(19) United States
(12) Patent Application Publication
(10) Pub. No.: US 2023/0242647 A1
(43) Pub. Date: Aug. 3, 2023

(54) ENGINEERED IMMUNOGLOBULINS

(71) Applicant: Novartis AG, Basel (CH)

(72) Inventors: John BLANKENSHIP, Acton, MA (US); Justine Celine Patricia GUYOT, Zimmersheim (FR); Brian HOLMBERG, Somerville, MA (US); Sebastien IRIGARAY, Zimmersheim (FR); Darko SKEGRO, Riehen (CH)

(21) Appl. No.: 17/997,482

(22) PCT Filed: Apr. 29, 2021
(86) PCT No.: PCT/IB2021/053582

§ 371 Date: Oct. 28, 2022

Related U.S. Application Data
(60) Provisional application No. 63/018,694, filed on May 1, 2020.

(51) Int. Cl. C07K 16/28; A61K 39/395; A61P 35/00

(52) U.S. Cl. CPC C07K 16/283; A61K 39/3955; A61P 35/00; A61K 2039/505

(57) ABSTRACT

The present invention provides engineered immunoglobulins or fragments thereof and methods for their preparation and uses. The engineered immunoglobulins have been derived from human IgG1 and engineered to confer Fc alpha receptor binding ability. In addition, the engineered IgG1 immunoglobulins or fragments thereof can retain binding to Fc gamma receptors and/or FcRn.

### SEQUENCE LISTING

[0001] The application contains a Sequence Listing which has been submitted electronically in ASCII format and is hereby incorporated by reference in its entirety. Said ASCII copy, created on Apr. 9, 2021 is named PAT058736-WO-PCT_SL.txt and is 975 Kbytes in size.

### FIELD OF THE INVENTION

[0002] The invention relates to engineered immunoglobulins and fragments thereof comprising modifications that promote recruitment of neutrophils and methods for their preparation. The engineered immunoglobulins and fragments thereof can be useful in the treatment of tumors, particularly solid tumors.

### BACKGROUND OF THE INVENTION

[0003] At present, all clinically approved antibodies comprise the immunoglobulin IgG isotype. Antibody-dependent cell-mediated cytotoxicity (ADCC) is a key mechanism for tumor cell killing mediated by IgG antibodies that recognize and bind to Fc gamma receptors (FcγR). However, in patients with a high tumor burden, relapses can occur and IgG antibody therapeutics may lose efficacy. This is primarily due to tumor and host related factors but may involve altered interaction with the target, cross talk between cell survival pathways, and involvement of anti-apoptotic proteins (Reslan et al., (2009) MABS., 1(3): 222-9). IgA represents an alternative isotype for antibody therapy by engaging Fc alpha receptors (FcαR) expressed by myeloid effector cells, such as neutrophils and tumor-resident myeloid-derived suppressor cells (MDSC). IgA is the second most abundant immunoglobulin in human serum after IgG; both monomeric IgA allotypes (IgA1 and IgA2) comprise up to 25% of human serum immunoglobulins. In the past, neutrophils were generally not considered as potential effector cells. However, neutrophils are the most abundant population of circulating white blood cells and have also been shown to infiltrate solid tumors (Gregory & Houghton (2011) Cancer Res., 71: 2411-16; Vogt Sionov et al., (2015) Cancer Microenviron., 8(3): 125-58; Uribe-Querol & Rosales (2015) J. Immunol. Res., Article ID: 983698; Rosales (2018) Front Physiol., 9: 113). MDSCs are also derived from myeloid lineages and are one of the most immunosuppressive cell types. IgA antibodies have been shown to effectively kill tumor cells by recruitment of neutrophils and MDSCs, thereby enhancing ADCC. Unfortunately, the use of IgA antibodies as therapeutics is hampered by several liabilities and limitations such as low expression yields and expensive purification schemes. In addition, the production suffers from heterogeneous glycosylation. IgA has multiple glycosylation sites that can be susceptible to glycan heterogeneity. Transient expression levels for monomeric IgA have been reported for human IgA1 at 30-70 μg/L (Lombana et al., (2019) MABS, 11: 1122-38; Meyer et al., (2016) MABS, 8: 87-98).

[0004] Therefore, there remains a need for an effective method of tumor cell killing by recruiting neutrophils to enhance ADCC. We have engineered immunoglobulin IgG Fc regions to develop an IgG that is capable of binding to FcγRs as well as to FcαRI (CD89) to effect tumor cell killing by the recruitment of neutrophils, MDSCs and enhanced ADCC.

### SUMMARY OF THE INVENTION

[0005] The present invention relates to engineered IgG1 immunoglobulins that comprise modified Fc regions such that the Fc region can bind to FcαRI (CD89). To generate IgG1 immunoglobulins with this property, a protein engineering strategy was designed to identify the specific amino acid residues and stretches of amino acid residues in an IgA immunoglobulin that are critical for binding to FcαRI. The extensive protein engineering work we performed is set out in the Examples. Initially a stepwise transfer of IgG1 constant domain to an IgA antibody was performed followed by IgG1/IgA hinge replacement. This was followed by crystal structure analysis of IgG1 and IgA1 Fc regions, which led to the identification of IgG1 residues structurally equivalent to IgA residues that were involved in IgA Fc/FcαRI interactions. The length of the IgG1 CH2/CH3 elbow was also shortened to correspond to that of IgA. The subsequent use of rational design led to modification of various amino acid residues in the CH2 and/or CH3 domains of IgG1 to substitute IgG1 residues with the corresponding residues from IgA. Semi-rational design and domain cutting were used to further refine the engineering of the IgG1 CH2 and CH3 domains.

[0006] As such, in a first aspect, the present invention provides engineered IgG1 immunoglobulins capable of recruiting FcαRI function. In the present disclosure the term “engineered IgG1 immunoglobulin” refers to a non-naturally occurring immunoglobulin of the IgG1 isotype in which at least one amino acid residue has been modified compared to the wild-type IgG1 immunoglobulin. In one embodiment, the present disclosure provides an engineered IgG1 immunoglobulin or fragment thereof comprising an Fc region comprising a first and second Fc domain wherein the first Fc domain comprises at least one amino acid modification, and wherein the first Fc domain has an amino acid sequence identity to an Fc domain from wild-type IgG1 (amino acids CH2-1.6 to CH3-125 (IMGT numbering for C-domain), equivalent to amino acids 231 to 445 (EU numbering) of SEQ ID NO: 1) of at least about 65%, and wherein the engineered IgG1 immunoglobulin or fragment thereof binds to and activates human FcαRI. For example, the first Fc domain can have an amino acid sequence identity to an Fc domain from wild-type IgG1 of at least about 65%, 70%, 75%, 80%. 90% or 95%. In one embodiment, the first Fc domain has an amino acid sequence identity to an Fc domain from wild-type IgG1 of at least about 70%. In a preferred embodiment, the first Fc domain has an amino acid sequence identity to an Fc domain from wild-type IgG1 of at least about 75%.

[0007] Binding of the engineered IgG1 immunoglobulin to FcαRI can be defined in terms of binding affinity as measured by KD, or selectivity of the engineered IgG1 immunoglobulin for FcαRI over other Fc receptors, or by competition binding to FcαRI when compared to wild-type IgG1 immunoglobulin.

[0008] Activation of an Fc receptor, e.g., a FcαRI or FcγRs, by an engineered IgG1 immunoglobulin of the present disclosure can be evaluated by measuring the level of ADCC in, e.g., a cell killing assay using effector cells such as polymorphonuclear cells (PMN) or peripheral blood mononuclear cells (PBMC). PMN can be used to characterize alpha effector function of engineered IgG1 immunoglobulins, whereas PBMC can be used to characterize gamma effector function. Cell killing assays can be run using a different cell lines including SK-BR-3, Calu-3, MDA-MB-453 or MDA-MB-175 cells.

[0009] As defined herein an Fc domain comprises a CH2 and CH3 domain. The modified first and/or modified second Fc domain can comprise modifications in the CH2 domain or in the CH3 domain or in both the CH2 and CH3 domains. The modifications can comprise an addition or insertion, a deletion or a substitution. Preferably, the modification is a substitution wherein the amino acid modification in the first Fc domain is a substitution that corresponds to an amino acid in an Fc domain of IgA, for example an Fc domain of wild-type IgA1 (SEQ ID NO: 254), an Fc domain of wild-type IgA2 (amino acids CH2-1.2 to CH3-125 of SEQ ID NO: 2 (IMGT numbering for C-domain)), an Fc domain of the m2 allotype of IgA2 (amino acids CH2-1.2 to CH3-125 of SEQ ID NO: 3 (IMGT numbering for C-domain); Lombana et al., (2019) MABS, 11: 1122-38; referred to herein as ‘parental IgA2’) or an affinity matured variant Fc domain of IgA1 or IgA2. Corresponding amino acids between two or more sequences can be determined by aligning sequences according to methods known in the art and described in detail below.

[0010] The amino acid modification(s) optionally provide one or more optimized properties relative to unmodified or wild-type Fc domains, although in some cases, the variants exhibit substantially identical biological properties to unmodified or wild-type Fc domains. Properties that may be optimized include, but are not limited to, binding to Fc receptors, e.g. FcαRI. Binding to FcαRI can be enhanced or reduced as demonstrated by an enhanced or reduced affinity for FcαRI. In one embodiment, the engineered IgG1 immunoglobulins of the present invention are optimized to possess enhanced affinity for a human FcαRI. Activation of FcαRI stimulates phagocytic or cytotoxic cells to destroy microbes, or infected cells by the mechanism of ADCC and therefore an engineered IgG1 immunoglobulin can have improved ADCC compared to a wild-type IgG1 immunoglobulin. Such optimized properties are anticipated to provide engineered IgG1 immunoglobulins or fragments thereof with enhanced therapeutic properties in humans, for example enhanced effector function and greater anti-cancer potency.

[0011] An “affinity matured variant Fc domain of IgA1 or IgA2” is defined herein as an Fc domain that includes amino acid modifications in the CH2 domain and/or CH3 domain. The amino acid modification(s) optionally provide one or more optimized properties relative to non-affinity matured variant Fc domains, although in some cases, the variants exhibit substantially identical biological properties to non-affinity matured variant Fc domains. Properties that may be optimized include, but are not limited to, binding to FcαRI. Binding to FcαRI can be enhanced or reduced as demonstrated by an enhanced or reduced affinity for FcαRI. In one embodiment, the affinity matured variant Fc domains of the present invention are optimized to possess enhanced affinity for a human FcαRI. In one embodiment, the Fc domain of the Fc variant has been affinity matured, whereby amino acid modifications have been made in the CH2 and/or CH3 domains to enhance binding of the Fc region to its target FcαRI. Such types of modifications may improve the association and/or the dissociation kinetics for binding to the target antigen. This optimized property is anticipated to provide engineered IgG1 immunoglobulins or fragments thereof with enhanced therapeutic properties in humans, for example enhanced effector function and greater anti-cancer potency.

[0012] In one embodiment, the engineered IgG1 immunoglobulin or fragment thereof comprising an Fc region that comprises modified first and second Fc domains is expressed as a homodimer, wherein the first and second Fc domains are the same. Binding affinity of the Fc region homodimer to FcαRI was measured using surface plasmon resonance and was found to be similar to the binding affinity (KD) of wild-type IgA for FcαRI. As tested herein, the binding affinity (KD) of parental IgA2 for FcαRI was found to be between about 2E-07M and about 6E-07M and the binding affinity of the engineered IgG1 immunoglobulins of the present disclosure was found to be between about 2E-10M and about 3.5E-06M (see Tables 23, 24 and 47). In an embodiment, an engineered IgG1 immunoglobulin of the present disclosure binds FcαRI with an affinity comparable to parental IgA2, or with an affinity improved by at least about 2-fold, about 3-fold, about 5-fold, about 10-fold, about 100-fold or about 1000-fold over parental IgA2.

[0013] In an embodiment of the present disclosure the engineered IgG1 immunoglobulin or fragment thereof can comprise an Fc domain selected from and comprised within the following sequences: SEQ ID Nos: 99 to 123, 146 to 149, 165 to 181. In one embodiment, the engineered IgG1 immunoglobulin or fragment thereof comprises an Fc domain comprised within SEQ ID NO: 122. In one embodiment, the engineered IgG1 immunoglobulin or fragment thereof comprises an Fc domain comprised within SEQ ID NO: 148.

[0014] Engineering of the IgG1 immunoglobulins of the present disclosure to confer FcαRI binding properties did however result in loss of binding to FcRn. Therefore studies were performed to determine the amino acid residues in the wild-type IgG1 Fc domain that were important for FcRn binding. Transfer of these residues to an IgA2 antibody was found to restore FcRn binding. In one embodiment, the present disclosure provides an engineered IgG1 immunoglobulin that binds to and activates human FcαRI and that also binds to human FcRn. In a preferred embodiment, the engineered IgG1 immunoglobulin binds to human FcRn with an affinity comparable to wild-type IgG1.

[0015] Engineering of the IgG1 immunoglobulins of the present disclosure to confer FcαRI binding properties also had an effect on the ability of the engineered IgG1 immunoglobulins to bind to FcγRs and recruit gamma effector function. Therefore studies were performed to substitute IgA residues with corresponding residues from IgG1 as well as making the additional amino acid modifications S239D and 1332E/S_CH2.3_D and I_CH2.117_E (EU/IMGT numbering for C-domain; ‘SDIE’ mutations) to the CH2 domain. In one embodiment, the present disclosure provides an engineered IgG1 immunoglobulin that binds to FcαRI, FcγRIa and FcγRIIIa. In one embodiment, the engineered IgG1 immunoglobulin or fragment thereof comprises an Fc domain comprised within SEQ ID NO: 148. In one embodiment, the engineered IgG1 immunoglobulin or fragment thereof comprises an Fc domain comprised within SEQ ID NO: 152.

[0016] The engineered IgG1 immunoglobulins of the aforementioned embodiments were constructed as homodimers. As such, it was challenging to maintain both Fcα and Fcγ effector functions to a level comparable to parental IgA or wild-type IgG1. To address this, engineered IgG1 immunoglobulins were constructed as heterodimers utilising Fc domains with different binding properties. As such, in a second aspect, the present invention provides an engineered IgG1 immunoglobulin that binds to FcαRI, FcRn and Fcγ receptors with an affinity comparable to or improved over parental IgA and wild-type IgG1. In one embodiment, the present disclosure provides an engineered IgG1 immunoglobulin comprising a first Fc domain engineered to bind to FcαRI and a second Fc domain comprising the amino acid sequence of wild-type IgG1 to bind to Fcγ receptors and FcRn. Alternatively, the second Fc domain comprises residues spatially located on top of CH2 derived from IgA, for example, packed top loops and disulfide bonds; however with this embodiment, FcγR are no longer recruited and additional mutations are desired to restore FcRn binding, such as ‘LS’ or ‘YTE’ mutations (described in more detail below).

[0017] To ensure correct heterodimer pairing upon expression of the engineered immunoglobulins, mutations were introduced to the first and second Fc domains to create a protuberance and a corresponding cavity. Such ‘knob into hole’ mutations are described in the art (Merchant et al., (1998) Nat. Biotechnol., 16: 677-681). In one embodiment, the present disclosure provides an engineered IgG1 immunoglobulin wherein the first Fc domain comprises the amino acid mutation T336W and S354C/T_CH3.22_W and S_CH3.10_C to introduce a ‘knob’, and the second Fc domain comprises the amino acid mutations Y349C, T366S, L368A and Y407V/Y_CH3.5_C, T_CH3.22_S, L_CH3.24_A and Y_CH3.86_V to introduce a ‘hole’ (EU/IMGT numbering for C-domain). In an embodiment, the first Fc domain can comprise an Fc domain comprised within SEQ ID NO: 132, 134, 136, 138, 140, 142, 144, 154, 159, 160, 161, 162, 163 or 164. In an embodiment, the second Fc domain can comprise an Fc domain comprised within SEQ ID NO: 133, 135, 137, 139, 141, 143, 145, 155, 156, 157 or 158. To further improve binding of the engineered IgG1 immunoglobulin to FcRn, additional mutations can be made to the Fc domain, for example, the ‘LS’ mutations M428L and N434S/M_CH3.107_L and N_CH3.114_S (EU/IMGT numbering for C-domain) and/or the ‘YTE’ mutations M252Y, S254T and T256E/M_CH2.15.1_Y, S_CH3.16_T and T_CH2.18_E (EU/IMGT numbering for C-domain). In an embodiment, the first Fc domain comprises the ‘LS’ mutations and can comprise an Fc domain comprised within SEQ ID NO: 154 or 162. In another embodiment, the second Fc domain comprises the ‘YTE’ mutations and can comprise an Fc domain comprised within SEQ ID NO: 163.

[0018] For the engineered IgG1 immunoglobulin of the present disclosure to function optimally, for example, to bind to FcαRI, FcRn and Fcγ receptors with an affinity comparable to or improved over parental IgA and wild-type IgG1, the amino acid modifications for introducing a ‘hole’ are made in the Fc domain comprising the amino acid modifications for binding to and activating FcαRI. In one embodiment, the present disclosure provides an engineered IgG1 immunoglobulin comprising a first Fc domain that binds to human Fcγ receptors and FcRn and comprises amino acid mutations to create a ‘knob’, and a second Fc domain that binds to human FcαRI and comprises amino acid mutations to create a ‘hole’. In another embodiment, the first Fc domain can additionally comprise the ‘LS’ mutations or ‘SDIE’ mutations or both to restore full FcγR effector function, for example, the first Fc domain can comprise an Fc domain comprised within SEQ ID NO: 161, 162 or 164.

[0019] In an embodiment of the present disclosure, the engineered IgG1 immunoglobulin comprises a first Fc domain selected from an Fc domain comprised within SEQ ID NO: 154, 159, 160, 161 or 162, and a second Fc domain selected from an Fc domain comprised within SEQ ID NO: 137 or 157. In an embodiment, the engineered IgG1 immunoglobulin comprises a first Fc domain comprised within SEQ ID NO: 137 and a second Fc domain comprised within SEQ ID NO: 154. In one embodiment, the engineered IgG1 immunoglobulin comprises a first Fc domain comprised within SEQ ID NO: 157 and a second Fc domain comprised within SEQ ID NO: 159. In an embodiment, the engineered IgG1 immunoglobulin comprises a first Fc domain comprised within SEQ ID NO: 157 and a second Fc domain comprised within SEQ ID NO: 160. In one embodiment, the engineered IgG1 immunoglobulin comprises a first Fc domain comprised within SEQ ID NO: 157 and a second Fc domain comprised within SEQ ID NO: 161. In an embodiment, the engineered IgG1 immunoglobulin comprises a first Fc domain comprised within SEQ ID NO: 157 and a second Fc domain comprised within SEQ ID NO: 162.

[0020] Binding affinity of the engineered IgG1 immunoglobulins of the present invention was determined using surface plasmon resonance (SPR). The resulting engineered immunoglobulins were generated to have the following binding properties (see Table 37):
[0021] a. FcαRI binding in a range from parental IgA2-like binding to 10-fold lower than parental IgA2;
[0022] b. FcαRI binding in a range from parental IgA2-like binding to 10-fold lower, and wild-type IgG1-like binding to Fcγ receptors;
[0023] c. FcαRI binding in a range from parental IgA2-like binding to 10-fold lower, and wild-type IgG1-like binding to FcRn;
[0024] d. FcαRI binding in a range from parental IgA2-like binding to 10-fold lower, and wild-type IgG1-like binding to Fcγ receptors and FcRn.

[0025] Binding affinity of the engineered IgG1 immunoglobulins of the present invention to FcαRI could be further enhanced by including amino acids determined by affinity maturation to contribute to improved binding. IgA2 Fc libraries were generated and screened to identify amino acid mutations that conferred enhanced FcαRI binding affinity to IgA2 variants compared to parental IgA2. These mutations improved the binding to FcαRI of more than about 225-fold when incorporated into an IgA2. These mutations were then incorporated into the engineered IgG1 immunoglobulins generated by rational design. These mutations improved the binding of these engineered IgG1 immunoglobulins to FcαRI by more than about 1200-fold. This was a significant improvement in binding to FcαRI for the IgA2 variants and it was very surprising to observe that when the mutations were incorporated into an engineered IgG1 immunoglobulin the binding to FcαRI improved again, by about 5-fold, over the IgA2 variants.

[0026] In an embodiment of the present disclosure, the engineered IgG1 immunoglobulin comprises a first Fc domain comprised within SEQ ID NO: 252, and a second Fc domain selected from an Fc domain comprised within SEQ ID NO: 159 or 161. The engineered IgG1 immunoglobulin with a first and second Fc domain from amino acid sequences SEQ ID NO: 252 and 159, respectively was preferred if gamma effector function (i.e. binding to FcγRs) was not desired. The engineered IgG1 immunoglobulin with a first and second Fc domain from amino acid sequences SEQ ID NO: 252 and 161, respectively was preferred if gamma effector function (i.e. binding to FcγRs) was desired.

[0027] In one embodiment, an engineered IgG1 immunoglobulin of the present disclosure comprises an amino acid modification at a position selected from the group consisting of: CH2.10, CH2.89, CH2.91, CH2.94, CH2.97, CH2.99, CH3.45, CH3.105, CH3.109, CH3.118 and CH3.124, wherein numbering is according to IMGT numbering for C-domain. In one embodiment, the engineered IgG1 immunoglobulin comprises an amino acid modification at positions CH2.94, CH2.97 and CH3.45. In a preferred embodiment, an engineered IgG1 immunoglobulin of the present disclosure comprises the amino acid modifications Q_CH2.94_E, L_CH2.97_Y and S_CH3.45_D. When characterised in an in vitro cell killing assay, these engineered IgG1 immunoglobulin were shown to have improved killing properties in a PMN assay compared to the parental engineered IgG1 immunoglobulin and parental IgA2.

### BRIEF DESCRIPTION OF THE FIGURES

[0028] FIG. 1: This schematic figure shows the overall strategy of the rational design used in the present application for the transfer of amino acid residues from IgA to IgG. The resulting IgG structures contain residues from IgA in both or one Fc domains of the Fc region.

[0029] FIG. 2a-g: These schematic figures depict a full length IgA with the tail piece (FIG. 2a) and without the tailpiece (FIG. 2b), the transfer of constant domains CH1 (FIG. 2c) and hinge (FIG. 2d) from IgG1 to an IgA, the position of the “CH2/CH3 elbow” region (FIG. 2e), IgG/IgA CH2/CH2 modifications (FIG. 2f) and IgG/IgA CH3/CH3 modifications (FIG. 2g).

[0030] FIG. 3a-g: These schematic figures summarize the semi-rational design used to identify amino acid residue positions involved in the IgA2/FcαRI interaction for subsequent transfer of these residues into an IgG1 Fc. Modifications were made following beta-strand scanning (FIG. 3a, FIG. 3b) and domain cutting (top/down, front/side) (FIG. 3c-3g). FIG. 3h and FIG. 3i depict modifications made to the CH2 and CH3 domains, respectively, to determine residues involved in indirect FcαRI binding.

[0031] FIG. 4: These schematic figures illustrate the positions on the engineered IgG1 immunoglobulins where modifications were made to the CH2, CH3 and CH2/CH3 elbow regions to incorporate IgA residues. FIG. 4a also comprises a hinge region from IgA, whereas FIG. 4b comprises a hinge region from IgG1. These engineered IgG1 immunoglobulins retained the FcαRI binding capacity of an IgA immunoglobulin.

[0032] FIG. 5a-b: These schematic figures illustrate the approximate position of modifications made to restore FcRn binding (FIG. 5a) and FcγR binding (FIG. 5b). In FIG. 5a, the position of the amino acids in an IgA immunoglobulin CH3 domain that were replaced with the corresponding residues from an IgG1 immunoglobulin to restore FcRn binding are shown with a star. In FIG. 5b, the position of the SDIE mutations made to the IgG1 immunoglobulin CH2 domain to restore FcγR binding are shown with a star.

[0033] FIG. 6a-e: These schematic figures summarize the engineered IgG1 heterodimeric immunoglobulins generated to have hFcαRI, FcRn and FcγR binding. All constructs have “knob into hole” modifications with the addition of LS mutations (FIGS. 6a, 6c and 6e) and/or with the addition of SDIE mutations (FIGS. 6d and 6e).

[0034] FIG. 7a-d: These schematic figures indicate the approximate positions of the mutation sets generated by affinity maturation of IgA and their application to the engineered IgG1 heterodimeric immunoglobulins. FIG. 7a shows the position of the mutations in a full-length IgA2 immunoglobulin and FIGS. 7b and 7c show incorporation of the same mutation set into an IgG1 immunoglobulin capable of binding to FcαRI. FIG. 7d schematically shows an engineered IgG1 heterodimeric immunoglobulin to which the affinity matured mutation set from IgA2 was applied.

[0035] FIG. 8: This schematic figure shows the position of the CH2/CH3 elbow region at the interface of the CH2 and CH3 domains of IgA and IgG. Dark grey=IgG (PDB 1FC1)/IgA FC (PDB 1OWO) overlapped, Light grey=IgG1 (PDB 1FC1)/IgA FC (PDB 1OWO) CH2-CH3 hinge overlapped. Arrows indicate elbows regions.

[0036] FIG. 9: This schematic figure of IgA2 Fc shows the location of the disulfide bonds and packed loops spatially located on top of IgA2 Fc.

[0037] FIG. 10: This figure shows the effect on PMN cytotoxicity in a cell killing assay of homodimer lead candidates on SK-BR-3 cells compared to parental IgA2 (SEQ ID NO: 3 (●)). The tested candidates had the following sequences: SEQ ID NO: 119 (▪), SEQ ID NO: 120 (▴), SEQ ID NO: 122 (▾) and SEQ ID NO: 123 (♦).

[0038] FIG. 11: This figure shows the effect on PMN cytotoxicity in a cell killing assay of the homodimer lead candidate with sequence SEQ ID NO: 122 (▪) on Calu-3 cells, compared to parental IgA2 (SEQ ID NO: 3 (●)).

[0039] FIG. 12: This figure shows the phagocytotic activity of the homodimer lead candidate with sequence SEQ ID NO: 122 (▴) on SK-BR-3 cells, compared to parental IgA2 (SEQ ID NO: 3 (●)) and wild-type IgG1 (SEQ ID NO: 1 (▪)).

[0040] FIG. 13a-d: This figure shows the effect on PMN cytotoxicity of homodimer lead candidates having the sequences SEQ ID NO: 148 or 152 on SK-BR-3 cells. In FIG. 13a the effect of the candidate with sequence SEQ ID NO: 148 (▾) is shown in a PMN killing assay compared to parental IgA2 (SEQ ID NO: 3 (●)). FIG. 13b shows the percentage specific killing with increasing concentration of the candidate with sequence SEQ ID NO: 148 (▪) and parental IgA2. In FIG. 13c the effect of the candidate with sequence SEQ ID NO: 152 (♦) is shown in a PMN killing assay compared to parental IgA2 (SEQ ID NO: 3 (●)). FIG. 13d shows the percentage specific killing with increasing concentration of the candidate with sequence SEQ ID NO: 152 (▪) and parental IgA2.

[0041] FIG. 14a-b: This figure shows the PMN cytotoxicity of the homodimer lead candidate having the sequence SEQ ID NO: 148 (▴) on Calu-3 cells, compared to parental IgA2 (SEQ ID NO: 3 (●)). In FIG. 14a the effect in a PMN killing assay and FIG. 14b shows the percentage specific killing with increasing concentration of the candidate or parental IgA2.

[0042] FIG. 15a-d: This figure shows the PBMC cytotoxicity of homodimer lead candidates having the sequences SEQ ID NO: 148 or 152 on SK-BR-3 cells. In FIG. 15a the effect of the candidate with sequence SEQ ID NO: 148 (▾) is shown in a PMN killing assay compared to parental IgA2 (SEQ ID NO: 3 (●)). FIG. 15b shows the percentage specific killing with increasing concentration of the candidate with sequence SEQ ID NO: 148 (▪) and parental IgA2. In FIG. 15c the effect of the candidate with sequence SEQ ID NO: 152 (♦) is shown in a PMN killing assay compared to parental IgA2 (SEQ ID NO: 3 (●)). FIG. 15d shows the percentage specific killing with increasing concentration of the candidate with sequence SEQ ID NO: 152 (▪) and parental IgA2.

[0043] FIG. 16: This figure shows the phagocytosis activity of the homodimer lead candidates with sequence SEQ ID NO: 122 (▴), SEQ ID NO: 148 (▾) and SEQ ID NO: 152 (♦) on SK-BR-3 cells, compared to parental IgA2 (SEQ ID NO: 3 (●)) and wild-type IgG1 (SEQ ID NO: 1 (▪)).

[0044] FIG. 17a-j: This figure shows the PMN cytotoxicity of five heterodimer lead candidates having the sequences SEQ ID NO: 137-154, 157-159, 157-160, 157-161, 157-162 on SK-BR-3 cells. In FIG. 17a the effect of the heterodimer candidate with sequence SEQ ID NO: 137-154 (♦) is shown in a PMN killing assay compared to parental IgA2 (SEQ ID NO: 3 (●)). FIG. 17b shows the percentage specific killing with increasing concentration of the same heterodimeric candidate (▪) and parental IgA2 (●). In FIG. 17c the effect of the heterodimeric candidate with sequence SEQ ID NO: 157-159 (▾) is shown in a PMN killing assay compared to parental IgA2 (SEQ ID NO: 3 (●)). FIG. 17d shows the percentage specific killing with increasing concentration of the same heterodimeric candidate (▪) and parental IgA2 (●). In FIG. 17e the effect of the heterodimeric candidate with sequence SEQ ID NO: 157-160 (┌) is shown in a PMN killing assay compared to parental IgA2 (SEQ ID NO: 3 (●)). FIG. 17f shows the percentage specific killing with increasing concentration of the same heterodimeric candidate (▪) and parental IgA2 (●). In FIG. 17g the effect of the heterodimeric candidate with sequence SEQ ID NO: 157-161 (▾) is shown in a PMN killing assay compared to parental IgA2 (SEQ ID NO: 3 (●)). FIG. 17h shows the percentage specific killing with increasing concentration of the same heterodimeric candidate (▪) and parental IgA2 (●). In FIG. 17i the effect of the heterodimeric candidate with sequence SEQ ID NO: 157-162 (V) is shown in a PMN killing assay compared to parental IgA2 (SEQ ID NO: 3 (●)). FIG. 17j shows the percentage specific killing with increasing concentration of the same heterodimeric candidate (▪) and parental IgA2 (●).

[0045] FIG. 18a-j: This figure shows the PBMC cytotoxicity of five heterodimer lead candidates having the sequences SEQ ID NO: 137-154, 157-159, 157-160, 157-161, 157-162 on SK-BR-3 cells. In FIG. 18a the effect of the heterodimer candidate with sequence SEQ ID NO: 137-154 (♦) is shown in a PMN killing assay compared to parental IgA2 (SEQ ID NO: 3 (●)). FIG. 18b shows the percentage specific killing with increasing concentration of the same heterodimeric candidate (▪) and parental IgA2 (●). In FIG. 18c the effect of the heterodimeric candidate with sequence SEQ ID NO: 157-159 (▾) is shown in a PMN killing assay compared to parental IgA2 (SEQ ID NO: 3 (●)). FIG. 18d shows the percentage specific killing with increasing concentration of the same heterodimeric candidate (▪) and parental IgA2 (●). In FIG. 18e the effect of the heterodimeric candidate with sequence SEQ ID NO: 157-160 (▾) is shown in a PMN killing assay compared to parental IgA2 (SEQ ID NO: 3 (●)). FIG. 18f shows the percentage specific killing with increasing concentration of the same heterodimeric candidate (▪) and parental IgA2 (●). In FIG. 18g the effect of the heterodimeric candidate with sequence SEQ ID NO: 157-161 (▾) is shown in a PMN killing assay compared to parental IgA2 (SEQ ID NO: 3 (●)). FIG. 18h shows the percentage specific killing with increasing concentration of the same heterodimeric candidate (▪) and parental IgA2 (●). In FIG. 18i the effect of the heterodimeric candidate with sequence SEQ ID NO: 157-162 (▾) is shown in a PMN killing assay compared to parental IgA2 (SEQ ID NO: 3 (●)). FIG. 18j shows the percentage specific killing with increasing concentration of the same heterodimeric candidate (▪) and parental IgA2 (●).

[0046] FIG. 19: This figure shows the phagocytosis activity of five heterodimer lead candidates having the sequences SEQ ID NO: 137-154 (●), 157-159 (▪), 157-160 (▴), 157-161 (▾) and 157-162 (♦) on SK-BR-3 cells, compared to parental IgA2 (SEQ ID NO: 3 (●)) and wild-type IgG1 (SEQ ID NO: 1 (▪)).

[0047] FIG. 20: This figure shows the PMN cytotoxicity of increasing concentrations of the homodimeric candidates with sequence: SEQ ID NOs: 122 (▪), 148 (▴), 204 (▾), 209 (♦) and 214 ( [symbol] ), and parental IgA2 (SEQ ID NO: 3 (●)) on SK-BR-3 cells, in an ADCC assay as described in Example 6. The efficacy (Emax %) for each homodimeric candidates was as follows: SEQ ID NO: 3: 25%, SEQ ID NO: 122: 32%, SEQ ID NO: 148: 27%, SEQ ID NO: 204: 28%, SEQ ID NO: 209: 35% and SEQ ID NO: 214: 34%.

[0048] FIG. 21: This figure shows the PMN cytotoxicity of increasing concentrations of the homodimeric candidates with sequence: SEQ ID NOs: 122 (▪), 148 (▴), 204 (▾), 209 (▴) and 214 ( [symbol] ), and parental IgA2 (SEQ ID NO: 3 (●)) on Calu-3 cells, in an ADCC assay as described in Example 6. The efficacy (Emax %) for each homodimeric candidates was as follows: SEQ ID NO: 3: 42%, SEQ ID NO: 122: 44%, SEQ ID NO: 148: 41%, SEQ ID NO: 204: 71%, SEQ ID NO: 209: 76% and SEQ ID NO: 214: 81%.

[0049] FIG. 22: This figure shows the PMN cytotoxicity of increasing concentrations of the homodimeric candidate with sequence SEQ ID NO: 214 ( [symbol] ) and parental IgA2 (SEQ ID NO: 3 (●)) on MDA-MB-453 cells, in an ADCC assay as described in Example 6. The EC50 value for the homodimeric candidate with sequence SEQ ID NO: 3 was 2.45 nM and the EC50 value for the homodimeric candidate with sequence SEQ ID NO: 214 was 0.36 nM.

[0050] FIG. 23 This figure shows the PMN cytotoxicity of increasing concentrations of the homodimeric candidate with sequence SEQ ID NO: 214 ( [symbol] ) and parental IgA2 (SEQ ID NO: 3 (●)) on MDA-MB-175 cells, in an ADCC assay as described in Example 6.

[0051] FIG. 24a-d: This figure shows the PMN and PBMC cytotoxicity of increasing concentrations of the heterodimeric candidates on SK-BR-3 cells, in an ADCC assay as described in Example 6. FIGS. 24a and 24b show the heterodimeric candidates with sequences SEQ ID NOs: 157-159 (▪) and 252-159 (▴), compared to parental IgA2 (SEQ ID NO: 3 (●); FIG. 24a) and wild-type IgG1 (SEQ ID NO: 1 (●); FIG. 24b), respectively. FIGS. 24c and 24d show the heterodimeric candidates with sequences SEQ ID NOs: 157-161 (▾) and 252-161 (♦) compared to parental IgA2 (SEQ ID NO: 3 (●); FIG. 24c) and wild-type IgG1 (SEQ ID NO: 1 (●); FIG. 24d), respectively.

[0052] FIG. 25: This figure shows overall improvement of thermal stability of engineered immunoglobulins compared to both IgA2 and IgG1. Individual thermograms of engineered immunoglobulins of sequence SEQ ID NO: 119, 120, 122, 123 and their parental IgG1 and IgA2 (SEQ ID NO: 1 and 2, respectively) were obtained by DSC measurement and overlapped. Arrows represent increase of CH2 melting temperature (TM) compared to CH2 TM of IgG1 or IgA2, measured as molar heat capacity (kJ/mol K).

[0053] FIG. 26: This figure shows thermal stability improvement of both CH2 and CH3 domains of engineered immunoglobulins compared to IgA2. Individual thermograms of engineered immunoglobulins of sequence SEQ ID NO: 126, 127, 128, 129 and their parental IgA2 Fc (SEQ ID NO: 125) were obtained by DSC measurement and overlapped, measured as molar heat capacity (kJ/mol K). Melting temperatures (TM) of individual CH2 and CH3 domains were extracted and presented in Table 48.

[0054] FIG. 27: This figure shows serum-time concentration profiles of IgG, IgA and engineered immunoglobulins in mice. Concentration in serum of (♦) immunoglobulin with sequence SEQ ID NO: 1 from HEK293T, (▴) immunoglobulin with sequence SEQ ID NO: 3 from HEK293T, (●) engineered immunoglobulin with sequence SEQ ID NOs:157-159 from HEK293T, (x) engineered immunoglobulin with sequence SEQ ID NOs: 252-159 from HEK293T.

[0055] FIG. 28: Serum-time concentration profiles of IgG, IgA and glyco-engineered immunoglobulins in mice. Concentration in serum of (♦) immunoglobulin with sequence SEQ ID NO: 1 from CHO-S, (▴) immunoglobulin with SEQ ID NO: 3 from CHO-S, (x) engineered immunoglobulin with sequence SEQ ID NOs: 252-159 from CHO-S, (▪) engineered immunoglobulin with sequence SEQ ID NOs: 212 from CHO-S, (∘) engineered immunoglobulin with sequence SEQ ID NO: 256 from CHO-S, (□) engineered immunoglobulin with sequence SEQ ID NO: 257 from CHO-S, (●) engineered immunoglobulin with sequence SEQ ID NO: 258 from CHO-S.

### DETAILED DESCRIPTION

[0056] Disclosed herein are engineered immunoglobulins, e.g., IgG1 or fragments thereof comprising mutated Fc regions such that the modified IgG1 binds to Fcα receptors thereby recruiting alpha effector function. The engineered immunoglobulins can also recruit IgG effector function through binding to Fcγ receptors. Furthermore, the engineered immunoglobulins can also bind to FcRn and therefore have an extended half-life.

### Definitions

[0057] In order that the present disclosure may be more readily understood, certain terms are specifically defined throughout the detailed description. Unless defined otherwise, all technical and scientific terms used herein have the same meaning as commonly understood by those of ordinary skill in the art to which this disclosure pertains.

[0058] In all cases where the term “comprise”, “comprises”, “comprising” or the like are used in reference to a sequence (e.g., an amino acid sequence), it shall be understood that said sequence may also be limited by the term “consist”, “consists”, “consisting” or the like. As used herein, the phrase “consisting essentially of” refers to the genera or species of active pharmaceutical agents included in a method or composition, as well as any excipients inactive for the intended purpose of the methods or compositions. In some aspects, the phrase “consisting essentially of” expressly excludes the inclusion of one or more additional active agents other than a multi-specific binding molecule of the present disclosure. In some aspects, the phrase “consisting essentially of” expressly excludes the inclusion of one or more additional active agents other than a multi-specific binding molecule of the present disclosure and a second co-administered agent.

[0059] As used herein, the term “antibody” refers to a polypeptide of the immunoglobulin family that is capable of binding a corresponding antigen non-covalently, reversibly, and in a specific manner. The basic functional unit of each antibody is an immunoglobulin monomer containing only one Ig unit, defined herein as an “Ig monomer”. Secreted antibodies can also be dimeric with two Ig units (e.g. IgA), tetrameric with four Ig units or pentameric with five Ig units (e.g. mammalian IgM). The term “antibody” includes, for example, a monoclonal antibody (including a full length antibody which has an immunoglobulin Fc region). The Ig monomer is a Y-shaped molecule that consists of four polypeptide chains; two identical heavy chains and two identical light chains connected by disulfide bonds (Woof & Burton (2004) Nature Reviews Immunology, 4(2): 89-99). Each chain comprises a number of structural domains containing about 70-110 amino acids that are classified into two categories: variable or constant, according to their size and function. The heavy chain comprises one variable domain (variable heavy chain domain; abbreviated as VH) and three constant domains (abbreviated as CH1, CH2 and CH3). Each light chain comprises one variable domain (abbreviated as VL) and one constant domain (abbreviated as CL). Immunoglobulin domains have a characteristic immunoglobulin fold in which two beta sheets create a ‘sandwich’ shape, held together by interactions between conserved cysteine residues and other charged amino acids. The VH and VL regions can be further subdivided into regions of hypervariability, termed complementarity determining regions (CDR), interspersed with regions that are more conserved, termed framework regions (FR). Each VH and VL is composed of three CDRs and four FRs arranged from amino-terminus to carboxy-terminus in the following order: FR1, CDR1, FR2, CDR2, FR3, CDR3, and FR4. The variable regions of the heavy and light chains contain an antigen binding domain or antigen binding site that interacts with an antigen.

[0060] The term “antibody” includes, but is not limited to, monoclonal antibodies, human antibodies, humanized antibodies, camelid antibodies, chimeric antibodies, and anti-idiotypic (anti-Id) antibodies (including, e.g., anti-Id antibodies to antibodies of the present disclosure). The antibodies can be of any isotype/class (e.g., IgG, IgE, IgM, IgD, IgA and IgY), or subclass (e.g., IgG1, IgG2, IgG3, IgG4, IgA1 and IgA2).

[0061] The term “monospecific molecule,” as used herein, refers to a molecule that binds to one epitope on a target antigen. In some embodiments, a mono-specific molecule of the present disclosure is a monospecific antibody-like molecule. In some embodiments, a mono-specific molecule of the present disclosure is a monospecific antibody. The term “bispecific molecule” refers to a multi-specific binding molecule that binds to two different antigens. In some embodiments, a bispecific molecule of the present disclosure is a bispecific antibody-like molecule. The term “multi-specific binding molecule” as used herein refers to a molecule that binds to two or more different antigens. Recognition of each antigen is generally accomplished via an “antigen-binding domain” In some embodiments, a multi-specific binding molecule of the present disclosure is a multi-specific antibody-like molecule, such as a bispecific antibody-like molecule.

[0062] The term “antigen-binding site” refers to the part of an antibody that comprises determinants that form an interface that binds to the antigen, or an epitope thereof. The term “antigen binding site” may be used interchangeably with the term “antigen binding domain”. With respect to proteins (or protein mimetics), the antigen-binding site typically includes one or more loops (of at least four amino acids or amino acid mimics) that form an interface that binds to the antigen polypeptide. Typically, the antigen-binding site of an antibody molecule includes at least one or two CDRs and/or hypervariable loops, or more typically at least three, four, five or six CDRs and/or hypervariable loops.

[0063] “Complementarity-determining regions” (“CDRs”) as used herein, refer to the hypervariable regions of VL and VH. The CDRs are the target protein-binding site of the antibody chains that harbors specificity for such target protein. There are three CDRs (CDR1-3, numbered sequentially from the N-terminus) in each human VL or VH, constituting in total about 15-20% of the variable domains. CDRs can be referred to by their region and order. For example, “VHCDR1” or “HCDR1” both refer to the first CDR of the heavy chain variable region. The CDRs are structurally complementary to the epitope of the target protein and are thus directly responsible for the binding specificity. The remaining stretches of the VL or VH, the so-called framework regions, exhibit less variation in amino acid sequence (Kuby (2000) Immunology, 4th ed., Chapter 4. W.H. Freeman & Co., New York). The positions of the CDRs and framework regions can be determined using various known definitions in the art, e.g., Kabat, Chothia, IMGT, AbM, and combined definitions (see, e.g., Johnson et al., (2001) Nucleic Acids Res., 29:205-206; Chothia & Lesk, (1987) J. Mol. Biol., 196:901-917; Chothia et al., (1989) Nature, 342:877-883; Chothia et al., J. Mol. Biol., (1992) 227:799-817; Lefranc, M. P., (2001) Nucleic Acids Res., 29:207-209; Al-Lazikani et al., (1987) J. Mol. Biol., 273:927-748 and Kabat et al., (1991) Sequences of proteins of immunological interest. 5th Edition—US DHHS, NIH publication n° 91-3242, pp 662, 680, 689). Definitions of antigen combining sites are also described in the following: Ruiz et al., (2000) Nucleic Acids Res., 28:219-221; MacCallum et al., (1996) J. Mol. Biol., 262:732-745; and Martin et al., (1989) PNAS. USA, 86:9268-9272; Martin et al., (1991) Methods Enzymol., 203:121-153; and Rees et al., (1996) In Sternberg M. J. E. (ed.), Protein Structure Prediction, Oxford University Press, Oxford, 141-172. In a combined Kabat and Chothia numbering scheme, in some embodiments, the CDRs correspond to the amino acid residues that are part of a Kabat CDR, a Chothia CDR, or both. For instance, in some embodiments, the CDRs correspond to amino acid residues 26-35 (HCDR1), 50-65 (HCDR2), and 95-102 (HCDR3) in a VH, e.g., a mammalian VH, e.g., a human VH; and amino acid residues 24-34 (LCDR1), 50-56 (LCDR2), and 89-97 (LCDR3) in a VL, e.g., a mammalian VL, e.g., a human VL. Under IMGT the CDR amino acid residues in the VH are numbered approximately 26-35 (CDR1), 51-57 (CDR2) and 93-102 (CDR3), and the CDR amino acid residues in the VL are numbered approximately 27-32 (CDR1), 50-52 (CDR2), and 89-97 (CDR3) (numbering according to “Kabat”). Under IMGT, the CDR regions of an antibody can be determined using the program IMGT/DomainGap Align. IMGT tools are available at world wide web (www).imgt.org.

[0064] In an embodiment, an antibody comprises an “antigen-binding fragment” of an antibody. Examples of such fragments include: (i) a Fab fragment, a monovalent fragment consisting of the VL, VH, CL and CH1 domains; (ii) a F(ab′)2 fragment, a bivalent fragment comprising two Fab fragments linked by a disulfide bridge at the hinge region; (iii) a Fd fragment consisting of the VH and CH1 domains; (iv) a Fv fragment consisting of the VL and VH domains of a single arm of an antibody, (v) a diabody (dAb) fragment, which consists of a VH domain; (vi) a camelid or camelized variable domain; (vii) a single chain Fv (scFv), see e.g., Bird et al., (1988) Science 242:423-426; and Huston et al., (1988) PNAS USA 85:5879-5883); (viii) a single domain antibody; (ix) diabodies (Dab) (bivalent and bispecific), and (x) chimeric (e.g., humanized) antibodies which may be produced by the modification of whole antibodies or those synthesized de novo using recombinant DNA technologies. These functional antibody fragments retain the ability to selectively bind with their respective antigen or receptor. These antibody fragments are obtained using conventional techniques known to those with skill in the art, and the fragments are screened for utility in the same manner as are intact antibodies.

[0065] In mammals there are two types of immunoglobulin light chain, which are called lambda (λ) and kappa (κ). Each antibody contains two light chains that are always identical; only one type of light chain, κ or λ, is present per antibody in mammals. The approximate length of a light chain is 211 to 217 amino acids and each light chain has two domains, one constant domain and one variable domain.

[0066] There are five types of mammalian Ig heavy chains denoted α, δ, ε, γ, and μ and the type of heavy chain present in the antibody defines the class or isotype of the antibody: IgM, IgG, IgA, IgD, IgE, respectively. The heavy chains vary in physiochemical, structural, and immunological properties but each heavy chain has two domains, a variable domain and a constant domain. The variable domain comprises a single Ig domain (approximately 110 amino acids long) and determines antibody binding specificity. The constant domain is identical in all antibodies of the same isotype, but differs in antibodies of different isotypes. Heavy chains γ, α and δ have a constant region composed of three tandem Ig domains, and a hinge region for added flexibility; heavy chains μ and ε have a constant region composed of four immunoglobulin domains (Woof & Burton, supra). The term “immunoglobulin” (Ig) is used interchangeably with the term “antibody” herein. In an embodiment, a “fragment thereof” of an immunoglobulin can be an Fc region or one or more Fc domains.

[0067] IgG is the most abundant antibody isotype in the blood (plasma), accounting for 70-75% of human immunoglobulins. IgG detoxifies harmful substances and is important in the recognition of antigen-antibody complexes by leukocytes and macrophages. IgG is further divided into 4 subclasses in humans: IgG1, IgG2, IgG3 and IgG4. IgM usually circulates in the blood, accounting for about 10% of human immunoglobulins. IgM has a pentameric structure in which five basic Y-shaped molecules are linked together. B cells produce IgM first in response to microbial infection/antigen invasion. Although IgM has a lower affinity for antigens than IgG, it has higher avidity for antigens because of its pentameric/hexameric structure. IgM, by binding to the cell surface receptor, also activates cell signaling pathways. IgA is abundant in serum, nasal mucus, saliva, breast milk, and intestinal fluid, accounting for 25% of human immunoglobulins. IgA forms dimers (i.e., two IgA monomers joined together). IgA in breast milk protects the gastrointestinal tract of neonates from pathogens. IgA is divided into 2 subclasses: IgA1 and IgA2. IgD accounts for less than 1% of human immunoglobulins and may be involved in the induction of antibody production in B cells, but its exact function remains unknown. IgE is present in minute amounts, accounting for no more than 0.001% of human immunoglobulins. Its original role is to protect against parasites. In regions where parasitic infection is rare, IgE is primarily involved in allergy.

[0068] Immune cell activity is modulated by a region of an antibody known as the fragment crystallisable region or “Fc region”. The Fc Region is composed of two polypeptide chains or Fc domains, which in IgG comprises the CH2 and CH3 constant domains or ‘CH2 domain’ and ‘CH3 domain’ respectively, of the heavy chain. IgM and IgE Fc regions contain three heavy chain constant domains (CH domains 2-4) in each polypeptide chain. The amino acid residues in the CH2 and CH3 domains can be numbered according to the EU numbering system (Edelman et al., (1969) PNAS. USA, 63, 78-85), “Kabat” numbering (Kabat et al., supra) or alternatively using the IMGT numbering for C domains. IMGT tools are available at world wide web (www).imgt.org.

[0069] The Fc region binds to cell surface receptors, “Fc receptors” and complement proteins mediating physiological effects of antibodies. Fc receptors are found on may cells of the immune system including: B lymphocytes, follicular dendritic cells, natural killer cells, macrophages, neutrophils, eosinophils, basophils, human platelets and mast cells. Binding of antibody Fc region to Fc receptors stimulates phagocytic or cytotoxic cells to destroy microbes, or infected cells by the mechanism of antibody-dependent cell-mediated cytotoxicity (ADCC). There are several different types of Fc receptors (FcR), which are classified based on the type of antibody that they recognize. For example, those that bind IgG are called Fc-gamma receptors (FcγR), those that bind IgA are called Fc-alpha receptors (FcαR) and those that bind IgE are called Fc-epsilon receptors (FccR). The classes of FcRs are also distinguished by the cells that express them (macrophages, granulocytes, natural killer cells, T and B cells) and the signaling properties of each receptor (Owen J et al., (2009) Immunology (7th ed.). New York: W.H. Freeman and Company. p 423). The following table (Table 1) summarizes the different Fc receptors, their ligands, cell distribution and binding effects.

TABLE 1
Summary of Fc receptors and their properties

| | Principal | | | |
|---|---|---|---|---|
| Receptor | antibody | | | |
| name | ligand | Affinity for ligand | Cell distribution | Effect following binding to antibody |
| FcγRI | IgG1 and | High (Kd~10⁻⁹ M) | Macrophages | Phagocytosis |
| (CD64) | IgG3 | | Neutrophils | Cell activation |
| | | | Eosinophils | Activation of respiratory burst |
| | | | Dendritic cells | Induction of microbe killing |
| FcγRIIA | IgG | Low (Kd > 10⁻⁷ M) | Macrophages | Phagocytosis |
| (CD32) | | | Neutrophils | Degranulation (eosinophils) |
| | | | Eosinophils | |
| | | | Platelets | |
| | | | Langerhans cells | |
| FcγRIIB1 | IgG | Low (Kd > 10⁻⁷ M) | B Cells | No phagocytosis |
| (CD32) | | | Mast cells | Inhibition of cell activity |
| FcγRIIB2 | IgG | Low (Kd > 10⁻⁷ M) | Macrophages | Phagocytosis |
| (CD32) | | | Neutrophils | Inhibition of cell activity |
| | | | Eosinophils | |
| FcγRIIIA | IgG | Low (Kd > 10⁻⁶ M) | NK cells | Induction of antibody-dependent cell- |
| (CD16a) | | | Macrophages | mediated cytotoxicity (ADCC) |
| | | | (certain tissues) | Induction of cytokine release by |
| | | | | macrophages |
| FcγRIIIB | IgG | Low (Kd > 10⁻⁶ M) | Eosinophils | Induction of microbe killing |
| (CD16b) | | | Macrophages | |
| | | | Neutrophils | |
| | | | Mast cells | |
| | | | Follicular dendritic | |
| | | | cells | |
| FcεRI | IgE | High | Mast cells | Degranulation |
| | | (Kd~10⁻¹⁰ M) | Eosinophils | Phagocytosis |
| | | | Basophils | |
| | | | Langerhans cells | |
| | | | Monocytes | |
| FcεRII | IgE | Low (Kd > 10⁻⁷ M) | B cells | Possible adhesion molecule |
| (CD23) | | | Eosinophils | IgE transport across human intestinal |
| | | | Langerhans cells | epithelium |
| | | | | Positive-feedback mechanism to |
| | | | | enhance allergic sensitization (B cells) |
| FcαRI | IgA | Low (Kd > 10⁻⁶ M) | Monocytes | Phagocytosis |
| (CD89) | | | Macrophages | Induction of microbe killing |
| | | | Neutrophils | |
| | | | Eosinophils | |
| Fcα/μR | IgA and | High for IgM, | B cells | Endocytosis |
| | IgM | Mid for IgA | Mesangial cells | Induction of microbe killing |
| | | | Macrophages | |
| FcRn | IgG | | Monocytes | Transfers IgG from a mother to fetus |
| | | | Macrophages | through the placenta |
| | | | Dendritic cells | Transfers IgG from a mother to infant |
| | | | Epithelial cells | in milk |
| | | | Endothelial cells | Protects IgG from degradation |
| | | | Hepatocytes | |

[0070] In an embodiment, an antibody comprises a full length antibody, or a full length immunoglobulin chain. In an embodiment, an antibody comprises an antigen binding or functional fragment of a full length antibody, or a full length immunoglobulin chain. The preparation of an antibody can be monoclonal or polyclonal. An antibody can also be a human, humanized, CDR-grafted, or in vitro generated antibody.

[0071] In one embodiment, the antibody or immunoglobulin can be recombinantly produced, e.g., produced by phage display or by combinatorial methods. Phage display and combinatorial methods for generating antibodies are known in the art (as described in, e.g., Ladner et al., U.S. Pat. No. 5,223,409; Kang et al., WO 92/18619; Dower et al., WO 91/17271; Winter et al., WO 92/20791; Markland et al., WO 92/15679; Breitling et al., WO 93/01288; McCafferty et al., WO 92/01047; Garrard et al., WO 92/09690; Ladner et al., WO 90/02809; Fuchs et al., (1991) Bio/Technology, 9:1370-1372; Hay et al., (1992) Hum Antibody Hybridomas, 3:81-85; Huse et al., (1989) Science 246:1275-1281; Griffths et al., (1993) EMBO J., 12:725-734; Hawkins et al., (1992) J Mol Biol., 226:889-896; Clackson et al., (1991) Nature, 352:624-628; Gram et al., (1992) PNAS, 89:3576-3580; Garrard et al., (1991) Bio/Technology, 9:1373-1377; Hoogenboom et al., (1991) Nuc Acid Res., 19:4133-4137; and Barbas et al., (1991) PNAS, 88:7978-7982; the contents of all of which are incorporated by reference herein).

[0072] In one embodiment, the antibody or immunoglobulin is a fully human antibody (e.g., an antibody made in a mouse which has been genetically engineered to produce an antibody from a human immunoglobulin sequence or an antibody isolated from a human), or a non-human antibody, e.g., a rodent (mouse or rat), goat, primate (e.g., monkey), camel antibody. Human monoclonal antibodies can be generated using transgenic mice carrying the human immunoglobulin genes rather than the mouse system. Splenocytes from these transgenic mice immunized with the antigen of interest are used to produce hybridomas that secrete human monoclonal antibodies with specific affinities for epitopes from a human protein (see, e.g., Wood et al., WO 91/00906, Kucherlapati et al., WO 91/10741; Lonberg et al., WO 92/03918; Kay et al., WO 92/03917; Lonberg, N. et al., (1994) Nature 368:856-859; Green, L. L. et al., (1994) Nature Genet. 7:13-21; Morrison, S. L. et al., (1994) PNAS USA 81:6851-6855; Bruggeman et al., (1993) Year Immunol 7:33-40; Tuaillon et al., (1993) PNAS 90:3720-3724; Bruggeman et al., (1991) Eur J Immunol 21:1323-1326).

[0073] An antibody or immunoglobulin can be one in which the variable region, or a portion thereof, e.g., the CDRs, are generated in a non-human organism, e.g., a rat or mouse. Chimeric, CDR-grafted, and humanized antibodies are within the invention. Antibodies generated in a non-human organism, e.g., a rat or mouse, and then modified, e.g., in the variable framework or constant region, to decrease antigenicity in a human are within the invention. Chimeric antibodies can be produced by recombinant DNA techniques known in the art (see Robinson et al., WO 87/002671; Akira et al., EP184187A1; Taniguchi, M., EP171496A1; Morrison et al., EP173494A1; Neuberger et al., WO 86/01533; Cabilly et al., U.S. Pat. No. 4,816,567; Cabilly et al., EP125023A1; Better et al., (1988) Science 240:1041-1043; Liu et al., (1987) PNAS 84:3439-3443; Liu et al., (1987), J. Immunol. 139:3521-3526; Sun et al., (1987) PNAS 84:214-218; Nishimura et al., (1987), Canc. Res. 47:999-1005; Wood et al., (1985) Nature 314:446-449; and Shaw et al., (1988), J. Natl Cancer Inst. 80:1553-1559).

[0074] A humanized or CDR-grafted antibody will have at least one or two but generally all three recipient CDRs (of heavy and or light immunoglobulin chains) replaced with a donor CDR. The antibody may be replaced with at least a portion of a non-human CDR or only some of the CDRs may be replaced with non-human CDRs. It is only necessary to replace the number of CDRs required for binding of the humanized antibody to the target antigen. Preferably, the donor will be a rodent antibody, e.g., a rat or mouse antibody, and the recipient will be a human framework or a human consensus framework. Typically, the immunoglobulin providing the CDRs is called the ‘donor’ and the immunoglobulin providing the framework is called the ‘acceptor’. In one embodiment, the donor immunoglobulin is a non-human (e.g., rodent). The acceptor framework is a naturally-occurring (e.g., a human) framework or a consensus framework, or a sequence about 85% or higher, preferably 90%, 95%, 99% or higher identical thereto.

[0075] As used herein, the term “consensus sequence” refers to the sequence formed from the most frequently occurring amino acids (or nucleotides) in a family of related sequences (See e.g., Winnaker, (1987) From Genes to Clones (Verlagsgesellschaft, Weinheim, Germany)). In a family of proteins, each position in the consensus sequence is occupied by the amino acid occurring most frequently at that position in the family. If two amino acids occur equally frequently, either can be included in the consensus sequence. A “consensus framework” refers to the framework region in the consensus immunoglobulin sequence.

[0076] An antibody can be humanized by methods known in the art (see e.g., Morrison, S. L., (1985), Science 229:1202-1207; Oi et al., (1986), BioTechniques 4:214, and Queen et al., U.S. Pat. Nos. 5,585,089, 5,693,761 and 5,693,762, the contents of all of which are hereby incorporated by reference). Humanized or CDR-grafted antibodies can be produced by CDR-grafting or CDR substitution, wherein one, two, or all CDRs of an immunoglobulin chain can be replaced. See e.g., U.S. Pat. No. 5,225,539; Jones et al., (1986) Nature 321:552-525; Verhoeyan et al., (1988) Science 239:1534; Beidler et al., (1988) J. Immunol. 141:4053-4060 and Winter U.S. Pat. No. 5,225,539, the contents of all of which are hereby expressly incorporated by reference. Also within the scope of the invention are humanized antibodies in which specific amino acids have been substituted, deleted or added. Criteria for selecting amino acids from the donor are described in U.S. Pat. No. 5,585,089, e.g., columns 12-16 of U.S. Pat. No. 5,585,089, the contents of which are hereby incorporated by reference. Other techniques for humanizing antibodies are described in Padlan et al., EP 519596 A1.

[0077] Methods for altering an antibody constant region are known in the art. Antibodies with altered function, e.g., altered affinity for an effector ligand, such as FcR on a cell, or the C1 component of complement can be produced by replacing at least one amino acid residue in the constant portion of the antibody with a different residue (see e.g., EP388151A1, U.S. Pat. Nos. 5,624,821 and 5,648,260).

[0078] A “modification” or “mutation” of an amino acid residue(s)/position(s), as used herein, refers to a change of a primary amino acid sequence as compared to a starting amino acid sequence, wherein the change results from a sequence alteration involving said one or more amino acid residue/positions. For example, typical modifications include substitution of the one or more residue(s) (or at said position(s)) with another amino acid(s) (e.g., a conservative or non-conservative substitution), insertion of one or more amino acids adjacent to said one or more residue(s)/position(s), and deletion of said one or more residue(s)/position(s), inversion of said one or more residue(s)/position(s), and duplication of said one or more residue(s)/position(s).

[0079] An “amino acid substitution” or “substitution”, refers to the replacement of an one or more existing amino acid residue(s) in a predetermined (starting or parent) amino acid sequence with a one or more different amino acid residue(s). For example, the substitution 1332E refers to a variant polypeptide, in this case a constant heavy chain variant, in which the isoleucine at position 332 is replaced with glutamic acid (EU numbering). Alternatively, the position of the substitution in the CH2 or CH3 domain can be given, for example, CH2.97 indicates a substitution at position 97 in a CH2 domain with the numbering according to IMGT numbering for C-domain. The exact substitution can also be indicated by, for example, L_CH2.97_Y, which indicates that the leucine at position 97 in a CH2 domain is replaced by tyrosine.

[0080] By ‘amino acid insertion’ or ‘insertion’ as used herein is meant the addition of an amino acid at a particular position in a parent polypeptide sequence. An insertion as described herein is designated by the symbol “\hat{ }”, followed by the position, followed by the amino acid that is inserted. For example, “\hat{ }236R” designates an insertion of arginine after position 236; “\hat{ }236RR” depicts the insertion of two arginines after position 236, etc. For ease of reference, the original numbering after an insertion is not changed; therefore in a molecule containing an insertion, the amino acid normally found following the insertion site is still numbered as if the insertion did not occur, unless noted otherwise.

[0081] By “amino acid deletion” or “deletion” as used herein is meant the removal of an amino acid at a particular position in a parent polypeptide sequence. A deletion as described herein is designated by the symbol “#”, preceded by the amino acid and position that are to be deleted. For example, G237 #designates the deletion of glycine at position 237. For ease of reference, the original numbering after a deletion is not changed; therefore in a molecule containing a deletion, the amino acid normally found following the deletion site is still numbered as if the deletion did not occur, unless stated otherwise.

[0082] Generally and preferably, the modification results in alteration in at least one physicobiochemical activity of the variant polypeptide compared to a polypeptide comprising the starting (or “wild-type”) amino acid sequence. For example, in the case of an antibody or a multi-specific binding molecule, a physicobiochemical activity that is altered can be binding affinity, binding capability and/or binding effect upon a target molecule.

[0083] A “conservative amino acid substitution” is one in which the amino acid residue is replaced with an amino acid residue having a similar side chain. Families of amino acid residues having similar side chains have been defined in the art. These families include amino acids with basic side chains (e.g., lysine (K), arginine (R), histidine (H)), acidic side chains (e.g., aspartic acid (D), glutamic acid (E)), uncharged polar side chains (e.g., glycine (G), asparagine (N), glutamine (Q), serine (S), threonine (T), tyrosine (Y), cysteine (C)), nonpolar side chains (e.g., alanine (A), valine (V), leucine (L), isoleucine (I), proline (P), phenylalanine (F), methionine (M), tryptophan (W)), beta-branched side chains (e.g., threonine (T), valine (V), isoleucine (I)) and aromatic side chains (e.g., tyrosine (Y), phenylalanine (F), tryptophan (W), histidine (H)).

[0084] The terms “percent identical” or “percent identity” in the context of two or more nucleic acids or polypeptide sequences, refers to two or more sequences or subsequences that are the same. Two sequences are “substantially identical” if two sequences have a specified percentage of amino acid residues or nucleotides that are the same (i.e., 60% identity, optionally 65%, 70%, 75%, 80%, 85%, 90%, 95%, or 99% identity over a specified region, or, when not specified, over the entire sequence), when compared and aligned for maximum correspondence over a comparison window, or designated region as measured using one of the following sequence comparison algorithms or by manual alignment and visual inspection. Optionally, the identity exists over a region that is at least about 50 nucleotides (or 10 amino acids) in length, or more preferably over a region that is 100 to 500 or 1000 or more nucleotides (or 20, 50, 200 or more amino acids) in length. A “percentage identity” or “percentage sequence identity” of the present disclosure can be calculated by (i) comparing two optimally aligned sequences (nucleotide or protein) over a window of comparison, (ii) determining the number of positions at which the identical nucleic acid base (for nucleotide sequences) or amino acid residue (for proteins) occurs in both sequences to yield the number of matched positions, (iii) dividing the number of matched positions by the total number of positions in the window of comparison, and then (iv) multiplying this quotient by 100% to yield the percent identity. If the “percent identity” is being calculated in relation to a reference sequence without a particular comparison window being specified, then the percent identity is determined by dividing the number of matched positions over the region of alignment by the total length of the reference sequence. Accordingly, for purposes of the present disclosure, when two sequences (query and subject) are optimally aligned (with allowance for gaps in their alignment), the “percent identity” for the query sequence is equal to the number of identical positions between the two sequences divided by the total number of positions in the query sequence over its length (or a comparison window), which is then multiplied by 100%.

[0085] For sequence comparison, typically one sequence acts as a reference sequence, to which test sequences are compared. When using a sequence comparison algorithm, test and reference sequences are entered into a computer, subsequence coordinates are designated, if necessary, and sequence algorithm program parameters are designated. Default program parameters can be used, or alternative parameters can be designated. The sequence comparison algorithm then calculates the percent sequence identities for the test sequences relative to the reference sequence, based on the program parameters.

[0086] The term “comparison window” as used herein includes reference to a segment of any one of the number of contiguous positions selected from the group consisting of from 20 to 600, usually about 50 to about 200, more usually about 100 to about 150 in which a sequence may be compared to a reference sequence of the same number of contiguous positions after the two sequences are optimally aligned. Methods of alignment of sequences for comparison are known in the art. Optimal alignment of sequences for comparison can be conducted, e.g., by the local homology algorithm of Smith & Waterman (1970) Adv. Appl. Math. 2:482c, by the homology alignment algorithm of Needleman & Wunsch (1970) J. Mol. Biol., 48: 443, by the search for similarity method of Pearson & Lipman (1988) PNAS. USA, 85: 2444, by computerized implementations of these algorithms (GAP, BESTFIT, FASTA, and TFASTA in the Wisconsin Genetics Software Package, Genetics Computer Group, 575 Science Dr., Madison, Wis.), or by manual alignment and visual inspection (see, e.g., Brent et al., (2003) Current Protocols in Molecular Biology).

[0087] Two examples of algorithms that are suitable for determining percent sequence identity and sequence similarity are the BLAST and BLAST 2.0 algorithms, which are described in Altschul et al., (1977) Nuc. Acids Res., 25: 3389-3402; and Altschul et al., (1990) J. Mol. Biol., 215: 403-410, respectively. Software for performing BLAST analyses is publicly available through the National Center for Biotechnology Information. This algorithm involves first identifying high scoring sequence pairs (HSPs) by identifying short words of length W in the query sequence, which either match or satisfy some positive-valued threshold score T when aligned with a word of the same length in a database sequence. T is referred to as the neighbourhood word score threshold (Altschul et al., (1990) supra). These initial neighbourhood word hits act as seeds for initiating searches to find longer HSPs containing them. The word hits are extended in both directions along each sequence for as far as the cumulative alignment score can be increased. Cumulative scores are calculated using, for nucleotide sequences, the parameters M (reward score for a pair of matching residues; always >0) and N (penalty score for mismatching residues; always <0). For amino acid sequences, a scoring matrix is used to calculate the cumulative score. Extension of the word hits in each direction are halted when: the cumulative alignment score falls off by the quantity X from its maximum achieved value; the cumulative score goes to zero or below, due to the accumulation of one or more negative-scoring residue alignments; or the end of either sequence is reached. The BLAST algorithm parameters W, T, and X determine the sensitivity and speed of the alignment. The BLASTN program (for nucleotide sequences) uses as defaults a word length (W) of 11, an expectation (E) or 10, M=5, N=−4 and a comparison of both strands. For amino acid sequences, the BLASTP program uses as defaults a word length of 3, and expectation (E) of 10, and the BLOSUM62 scoring matrix (see Henikoff & Henikoff, (1989) PNAS. USA, 89: 10915) alignments (B) of 50, expectation (E) of 10, M=5, N=−4, and a comparison of both strands.

[0088] The BLAST algorithm also performs a statistical analysis of the similarity between two sequences (see, e.g., Karlin & Altschul (1993) PNAS. USA, 90: 5873-5787). One measure of similarity provided by the BLAST algorithm is the smallest sum probability (P(N)), which provides an indication of the probability by which a match between two nucleotide or amino acid sequences would occur by chance. For example, a nucleic acid is considered similar to a reference sequence if the smallest sum probability in a comparison of the test nucleic acid to the reference nucleic acid is less than about 0.2, more preferably less than about 0.01, and most preferably less than about 0.001.

[0089] The percent identity between two amino acid sequences can also be determined using the algorithm of E. Meyers and W. Miller (Comput. Appl. Biosci. 4:11-17 (1988)) which has been incorporated into the ALIGN program (version 2.0), using a PAM120 weight residue table, a gap length penalty of 12 and a gap penalty of 4. In addition, the percent identity between two amino acid sequences can be determined using the Needleman & Wunsch supra algorithm which has been incorporated into the GAP program in the GCG software package (available at www.gcg.com), using either a Blossom 62 matrix or a PAM250 matrix, and a gap weight of 16, 14, 12, 10, 8, 6, or 4 and a length weight of 1, 2, 3, 4, 5, or 6.

[0090] Other than percentage of sequence identity noted above, another indication that two nucleic acid sequences or polypeptides are substantially identical is that the polypeptide encoded by the first nucleic acid is immunologically cross reactive with antibodies raised against the polypeptide encoded by the second nucleic acid, as described below. Thus, a polypeptide is typically substantially identical to a second polypeptide, for example, where the two peptides differ only by conservative substitutions. Another indication that two nucleic acid sequences are substantially identical is that the two molecules or their complements hybridize to each other under stringent conditions, as described below. Yet another indication that two nucleic acid sequences are substantially identical is that the same primers can be used to amplify the sequence.

[0091] The term “nucleic acid” is used herein interchangeably with the term “polynucleotide” and refers to deoxyribonucleotides or ribonucleotides and polymers thereof in either single- or double-stranded form. The term encompasses nucleic acids containing known nucleotide analogs or modified backbone residues or linkages, which are synthetic, naturally occurring, and non-naturally occurring, which have similar binding properties as the reference nucleic acid, and which are metabolized in a manner similar to the reference nucleotides. Examples of such analogs include, without limitation, phosphorothioates, phosphoramidates, methyl phosphonates, chiral-methyl phosphonates, 2-O-methyl ribonucleotides, peptide-nucleic acids (PNAs).

[0092] Unless otherwise indicated, a particular nucleic acid sequence also implicitly encompasses conservatively modified variants thereof (e.g., degenerate codon substitutions) and complementary sequences, as well as the sequence explicitly indicated. Specifically, as detailed below, degenerate codon substitutions may be achieved by generating sequences in which the third position of one or more selected (or all) codons is substituted with mixed-base and/or deoxyinosine residues (Batzer et al., (1991) Nucleic Acid Res., 19: 5081; Ohtsuka et al., (1985) J Biol Chem., 260: 2605-2608; and Rossolini et al., (1994) Mol Cell Probes, 8: 91-98). As used herein, the term, “optimized nucleotide sequence” means that the nucleotide sequence has been altered to encode an amino acid sequence using codons that are preferred in the production cell, in this case a Chinese Hamster Ovary cell (CHO). The optimized nucleotide sequence is engineered to retain completely the amino acid sequence originally encoded by the starting nucleotide sequence, which is also known as the “parental” sequence. In particular embodiments, the optimized sequences herein have been engineered to have codons that are preferred in CHO mammalian cells.

[0093] As used herein, “C-terminus” refers to the carboxyl terminal amino acid of a polypeptide chain having a free carboxyl group (—COOH). As used herein, “N-terminus” refers to the amino terminal amino acid of a polypeptide chain having a free amine group (—NH₂).

[0094] The term “operably linked” or “functionally linked”, as used herein, refers to a functional relationship between two or more polynucleotide (e.g., DNA) segments. Typically, it refers to the functional relationship of a transcriptional regulatory sequence to a transcribed sequence. For example, a promoter or enhancer sequence is operably linked to a coding sequence if it stimulates or modulates the transcription of the coding sequence in an appropriate host cell or other expression system. Generally, promoter transcriptional regulatory sequences that are operably linked to a transcribed sequence are physically contiguous to the transcribed sequence, i.e., they are cis-acting. However, some transcriptional regulatory sequences, such as enhancers, need not be physically contiguous or located in close proximity to the coding sequences whose transcription they enhance.

[0095] The terms “polypeptide” and “protein” are used interchangeably herein to refer to a polymer of amino acid residues. The phrases also apply to amino acid polymers in which one or more amino acid residue is an artificial chemical mimetic of a corresponding naturally occurring amino acid, as well as to naturally occurring amino acid polymers and non-naturally occurring amino acid polymer. Unless otherwise indicated, a particular polypeptide sequence also implicitly encompasses conservatively modified variants thereof.

[0096] The term “in vivo half-life”, as used herein, refers to the half-life of the molecule of interest or variants thereof circulating in the blood of a given mammal.

[0097] The term “subject” includes human and non-human animals. Non-human animals include all vertebrates, e.g., mammals and non-mammals, such as non-human primates, sheep, dog, cow, chickens, amphibians, and reptiles. Except when noted, the terms “patient” or “subject” are used herein interchangeably.

[0098] As used herein, phrases such as “a patient in need of treatment” or “a subject in need of treatment” includes subjects, such as mammalian subjects, that would benefit from administration of molecule or pharmaceutical composition of the present disclosure used, e.g., for detection, for a diagnostic procedure and/or for treatment.

[0099] As used herein, the terms term “treatment” or “treat” is herein defined as the application or administration of a multi-specific binding molecule according to the disclosure, or a pharmaceutical composition comprising said multi-specific binding molecule, to a subject or to an isolated tissue or cell line from a subject, where the subject has a particular disease (e.g., arthritis), a symptom associated with the disease, or a predisposition towards development of the disease (if applicable), where the purpose is to cure (if applicable), prevent (if applicable), delay the onset of, reduce the severity of, alleviate, ameliorate one or more symptoms of the disease, improve the disease, reduce or improve any associated symptoms of the disease or the predisposition toward the development of the disease. The term “treatment” or “treat” includes treating a patient suspected to have the disease as well as patients who are ill or who have been diagnosed as suffering from the disease or medical condition, and includes suppression of clinical relapse. The phrase “reducing the likelihood” refers to delaying the onset or development or progression of a disease, infection or disorder.

[0100] The term “therapeutically acceptable amount” or “therapeutically effective amount” or “therapeutically effective dose” interchangeably refer to an amount sufficient to effect the desired result (i.e., a reduction disease activity, reduction in disease progression, reduction in disease signs and/or symptoms, etc.). In some aspects, a therapeutically acceptable amount does not induce or cause undesirable side effects. A therapeutically acceptable amount can be determined by first administering a low dose, and then incrementally increasing that dose until the desired effect is achieved. A “prophylactically effective dosage” and a “therapeutically effective dosage” of the molecules of the present disclosure can prevent the onset of (if applicable), or result in a decrease in severity of, respectively, disease symptoms.

[0101] As used herein, “selecting” and “selected” in reference to a patient is used to mean that a particular patient is specifically chosen from a larger group of patients due to the particular patient having a predetermined criterion. Similarly, “selectively treating a patient” refers to providing treatment to a patient that is specifically chosen from a larger group of patients due to the particular patient having a predetermined criteria. Similarly, “selectively administering” refers to administering a drug to a patient that is specifically chosen from a larger group of patients due to the particular patient having a predetermined criterion.

[0102] Unless otherwise specifically stated or clear from context, as used herein, the term “about” in relation to a numerical value is understood as being within the normal tolerance in the art, e.g., within two standard deviations of the mean. Thus, “about” can be within +/−10%, 9%, 8%, 7%, 6%, 5%, 4%, 3%, 2%, 1%, 0.1%, 0.05%, or 0.01% of the stated value, preferably +/−10% of the stated value. When used in front of a numerical range or list of numbers, the term “about” applies to each number in the series, e.g., the phrase “about 1-5” should be interpreted as “about 1-about 5”, or, e.g., the phrase “about 1, 2, 3, 4” should be interpreted as “about 1, about 2, about 3, about 4, etc.”

[0103] The word “substantially” does not exclude “completely,” e.g., a composition which is “substantially free” from Y may be completely free from Y. Where necessary, the word “substantially” may be omitted from the definition of the disclosure.

[0104] The term “co-administer” refers to the simultaneous presence of two active agents in the blood of an individual. Active agents (e.g., additional therapeutic agents) that are co-administered with the disclosed antibodies and antigen-binding fragments can be concurrently or sequentially delivered.

[0105] Various aspects of the disclosure are described in further detail in the following sections and subsections.

[0106] Engineered Immunoglobulins

[0107] Besides the ability of antibodies to bind antigen, an important feature of antibodies is their ability to recruit immune effector function. Engagement of the humoral immune response is mainly governed by interactions with Clq and the initiation of the complement cascade (Meyer et al., (2014) MABS, 6(5):1133-44). The cellular immune response occurs mostly due to the interactions between the antibody and Fc gamma receptors (FcγRs). There are five activating FcγRs: the high affinity FcγRI (CD64) that can bind to monovalent antibody, and the lower affinity FcγRII*a and IIc (CD32), and FcγRIIIa (CD16a) and IIIb (CD16b) that require avidity-based interactions. There is one inhibitory receptor: FcγRIIb (CD32). Intracellular signalling through the activating receptors is modulated through the phosphorylation of immunoreceptor tyrosine-based activation motifs (ITAMs), which leads to effector functions such as antibody-dependent cell-mediated cytotoxicity (ADCC), antibody-dependent cellular phagocytosis (ADCP), and inflammation via the induction of cytokine secretion. In contrast, intracellular signalling through the inhibitory FcγRIIb is modulated through the phosphorylation of immunoreceptor tyrosine-based inhibitory motifs (ITIMs), which recruit phosphatases that counter-balance activating signalling pathways (Nimmerjahn & Ravetch, (2008) Nat Rev Immunol., 8: 34-47). Antibody interactions with FcγRs and Clq are dependent on the hinge and proximal CH2 amino acid sequence as well as glycosylation in the CH2 region (Edelman et al., (1969) PNAS USA, 63: 78-85).

[0108] Although many antibody-based therapies have shown clinical and commercial success, these therapeutics are often only effective in a subset of patients. To date, all commercial antibodies are of the IgG class, predominantly IgG1, that recruit immune effector function via FcγRIII (CD16). The typical reaction involves activation of natural killer (NK) cells that display FcγRIII on their cell surface by the Fc portion of an IgG antibody triggering ADCC. However NK cells are only one component of the innate immune system and activation of other forms of leukocytes could be used to enhance the ADCC response triggered by IgG. The IgA class of antibodies engage FcαRI, which is widely expressed on neutrophils. Neutrophils comprise the highest percentage of innate effector cells found in the circulation and their activation triggers both ADCC and ADCP. In addition they have been shown to infiltrate many solid tumors (Gregory & Houghton (2011) supra). However, since IgG antibodies do not bind to the FcαRI, most commercial antibody-based therapeutics cannot activate neutrophils. IgA based therapeutic antibodies have not been developed commercially due to various drawbacks and these class of antibodies also lack the favourable therapeutic properties of IgG antibodies. For example, The hinge region of IgA is heavily glycosylated, and producing proteins with multiple complex glycans can be problematic for bioprocessing and quality control during drug development (Woof & Kerr (2006) J. Pathol., 208: 270-82), IgA does not bind to C1q and therefore it cannot mediate CDC through the classical complement pathway (van Egmond et al., (2001) Trends Immunol., 22: 205-11), IgA also does not bind to Fcγ receptors and hence cannot take advantage of the diverse mechanisms for immune cell activation that are relevant to IgG1 therapeutics and IgA exhibits a shorter circulation half-life than IgG because of a lack of binding to the FcRn receptor, which is important for intracellular recycling. Combination therapy of IgG with IgA antibodies has not been developed due to regulatory and cost concerns and potential unwanted therapeutic effects.

[0109] Since the immunoglobulin-like domains of the human IgG and IgA classes share a high degree of structural homology, a number of groups have examined the possibility of transfer of properties of one class to the other. For example, single domains of IgA2 were appended to the end of the gamma 1 constant region creating a four-domain constant region (CH_{1g}-CH_{2g}-CH_{3g}-CH₃ₐ) (Chintalacharuvu et al., (2001) Clin Immunol., 101: 21-31) in an attempt to engage FcγRs and FcαRI. To make the constant region more similar to the alpha constant region the CH1 domain of gamma 1 was substituted for the alpha 1 constant region domain (CH₁ₐ-CH_{2g}-CH_{3g}-CH₃ₐ). These four-domain cross-isotype IgG/A chimeric antibodies form polymers with the J chain in a manner similar to natural IgA2 but had reduced transport by polymeric Ig receptors. The four-domain, cross-isotype antibodies were capable of mediating complement-dependent lysis of sheep red blood cells and appeared to be more pH-resistant than IgG1; however they had a 3-fold to 5-fold decrease in FcγRI affinity and possessed the short serum half-life of IgA2 (Chintalacharuvu et al., supra).

[0110] A Tandem IgG1/IgA2 antibody format was generated by Borrok et al whereby the Fc region of a trastuzumab binding IgG1 antibody was replaced with the Fc region of an IgA2 or the IgA2 Fc region was appended to the C-terminus of the full length IgG1 antibody (Borrok et al., (2015) MABS, 7(4): 743-51). These constructs exhibited enhanced ADCC and ADCP capabilities, with the IgG1/IgA2 tandem Fc format retaining IgG1 FcγR binding plus FcRn-mediated serum persistence, as well as having myeloid cell-mediated effector functions via FcαRI/IgA Fc interactions. Anti-human epidermal growth factor receptor-2 antibodies with the tandem IgG1/IgA2 Fc were shown to better recruit and engage cytotoxic PMN cells than either the parental IgG1 or IgA2. Pharmacokinetics of IgG1/IgA2 in BALB/c mice are similar to the parental IgG and far surpass the poor serum persistence of IgA2.

[0111] Early structural biology work was used to determine which part of the Fc domain of an IgG1 interacts with the Fcγ receptor (Woof et al., (1986) Molecular Immunology, 23(3): 319-330) and which part of the Fc domain of an IgA interacts with the Fcα receptor (Woof et al., (2011) Mucosal Immunology, 4(6): 590-7). With this knowledge, immunoglobulins have been generated that bind an Fcα receptor and an Fcγ receptor. For example, antigen-binding proteins with modified heavy chains were constructed in which a CH3 domain of the Fc region of a modified heavy chain was of the IgG1 isotype and a CH3 domain of the Fc region of another modified heavy chain was of the IgA isotype (WO 12/116926 A1, Bossenmaier & Kettenberger). A chimeric IgG-IgA antibody termed ‘cross-isotype’ antibody was described by Kelton et al, whereby the Fc region of the antibody was engineered to comprises a chimeric IgG CH2 domain having an α1 and/or α2 loop from IgA and a CH3 domain from IgA. FcRn binding activity could also be conferred to the chimeric molecule by adding a FcRn binding peptide to the C-terminus of the chimeric antibody (Kelton et al., (2014) Chem. Biol., 21(12): 1603-9; WO 14/065945 A1).

[0112] Whilst the above described chimeric IgG/IgA immunoglobulins do have the property of binding to both Fcα and Fcγ receptors; the Fc region still comprises a high proportion of IgA amino acid residues as it contains complete IgA Fc domains (e.g. CH2 and or CH3 domains) and therefore the Fc domain has greater than 50% IgA residues (WO 14/065945 A1). Therefore, these chimeric proteins are subject to the same drawbacks that have hampered the production of therapeutic IgA antibodies as discussed above, namely poor development properties. The chimeric proteins are also associated with lower affinity measured by SPR for FcγRs and for the FcαRI compared to wild-type, full length IgG1 and IgA2, respectively (Jung et al., (2010) PNAS USA., 107(2): 604-9; WO 14/065945 A1 (pages 27-28)).

[0113] In contrast, in the present invention, we have engineered an immunoglobulin Fc region of the IgG1 isotype that confers IgA effector function but with a minimal number of amino acid modifications. This is shown schematically in FIG. 1. Surprisingly, the desirable expression and manufacturing properties of an IgG1 were maintained with the additional benefit of neutrophil activation. Using rational design, the CH2 and CH3 domains of human IgA2 and human IgG1 were superimposed and length adjusted to determine the amino acid residues for modification. Using this method, the hIgA2 Fc/FcαRI interface was transferred into hIgG1 Fc, creating an IgG1-like molecule recruiting Fcα effector function. In addition, transfer of alpha effector functions was combined with further modifications to the Fc region to restore the capacity to bind FcRn, thereby extending half-life. In addition, to restore IgG effector function, the Fc region was further modified to introduce modifications that resulted in FcγR binding. An anti-HER2 binding antibody comprising the modified Fc sequences was used to exemplify the protein engineering with homodimeric and heterodimeric IgG1-like molecules generated.

[0114] 1. Engineered Homodimeric Immunoglobulins Recruiting FcαR Function

[0115] In a first aspect, the generation of engineered immunoglobulins of the human IgG1 isotype that recruit FcαR function was achieved by the transfer of human IgA2 Fc residues that interface with the human FcαRI to the Fc region of an IgG1 immunoglobulin using both rational and semi-rational design. As IgA naturally exists in a number of different forms (monomeric, dimeric, secretory), initial modifications to the IgA2 structure were made to generate a monomeric IgA2, which was the preferred form for the protein engineering. The tailpiece was removed from the CH3 domain and the proline residue at position 124 (IMGT numbering for C-domain) in the CH1 domain was substituted with arginine to reduce IgA2 heterogeneity. These modifications were followed by replacing the CH1 domain and hinge region of the IgA2 construct with the corresponding CH1 domain and hinge region from IgG1. These replacements had limited impact on FcαRI binding (see Example 1).

[0116] In silico analysis was then used to superimpose the Fc regions of IgG1 and IgA1 to identify the IgG1 residues that were structurally equivalent to IgA1 residues involved in the interaction of IgA1 with the FcαRI. The crystal structure of IgA2 Fc is not yet known; however the Fc regions of IgA1 and IgA2 are structurally very similar since they share 96.2% of identity/98.6% of similarity (alignment of CH2-CH3 sequences comprised in SEQ ID NO: 2 (amino acids CH2-1.2 to CH3-125 (IMGT numbering for C-domain) and SEQ ID NO: 254. These identified residues were then replaced in the IgG1 construct with the equivalent IgA2 residues. Whilst IgG1 and IgA2 share structural homology, the sequence length and angles between the CH2 and CH3 domains are different. This CH2-CH3 interface, comprising approximately the last three residues of the CH2 domain and the first six residues of the CH3 domain of IgA2, and termed herein as the “CH2-CH3 elbow”, was modified in IgG1 to shorten the lengths of the CH2 and CH3 domains in this region, to achieve a similar angle between these domains in the IgG1 3D structure as is found in IgA2. The beta-sheet structure of the IgA2 construct was then examined in the context of binding to FcαRI. One side of the sheet turns residue side chains towards FcαRI and the other side turns residue side chains towards the CH3-CH3 core interface. The CH3-CH3 core residues can affect the positioning of residue side chains in their interaction with FcαRI depending on their properties and steric hindrance. Since the beta sheets of the CH2 and CH3 domains of IgA2 and IgG1 share a high degree of structural homology, it was therefore possible to exchange the CH3 residues at the CH3-CH3 interface in the IgG1 construct with the corresponding residues from IgA2 CH3 to correctly orientate the residues interacting with FcαRI.

[0117] The use of rational design as described above, enabled the identification of important IgA2 residues and their subsequent transfer to an IgG1 construct. However, to fully complete the engineering campaign, a semi-rational approach was then performed to fine tune the CH2 and CH3 engineering to improve binding to FcαRI. As mentioned above, the beta sheets of IgG1 and IgA2 share a high degree of structural homology. The anti-parallel β-strands A, B, C, D, E, F and G (IMGT nomenclature) of IgA2 CH2 and CH3 were individually scanned by sequential substitution with the equivalent IgG1 β-strands. Following this, the β-strands of IgG1 were replaced two-by-two and three-by-three etc. with the equivalent IgA2 β-strand depending on their role in the IgA2-FcαRI interaction.

[0118] The IgG1 and IgA2 CH2 and CH3 domains can effectively be described as ‘building blocks’, and it is therefore possible to cut these domains into pieces. Two different types of sections were cut following the transverse plane (top-down section) and then the frontal plane (front-side section). This gave constructs that contained IgG1/IgA2 hybrid CH2 or CH3 domains comprising 50% IgA2 and 50% IgG1.

[0119] Semi-rational design was also used to determine which parts of the IgA2 Fc region are necessary for its interaction with the FcαRI, despite an apparent unrelated role or location at a long distance from the FcαRI interface. It was found that disulfide bonds and loops that connect the beta sheets, that are spatially located on top of IgA2 CH2 (see FIG. 3) play an important role in the correct positioning of CH2 residues at the FcαRI binding site. In addition, the α-helices located in CH3 that are solvent exposed were also shown to have an impact on IgA2-FcαRI interactions. It was surprising to discover the importance of these regions in FcαRI interactions given their distance from the IgA2-FcαRI binding site.

[0120] The work described above, enabled the generation of an engineered homodimeric immunoglobulins comprising an IgG1 Fc region in which a number of residues were substituted with IgA residues to confer FcαRI binding properties. In one embodiment, the present disclosure provides an engineered IgG1 immunoglobulin comprising a number of substitutions wherein the IgG1 immunoglobulin is capable of recognizing and binding to FcαRI. In one embodiment, the present disclosure provides an engineered IgG1 immunoglobulin wherein less than 35% of IgG1 residues in the Fc domain are replaced with the corresponding residue from IgA. In one embodiment, the present disclosure provides an engineered IgG1 immunoglobulin wherein less than about 35%, 30%, 25%, 20%, 15%, 10% of residues in the Fc domain are replaced with corresponding residues from IgA. In one embodiment, the present disclosure provides an engineered IgG1 immunoglobulin comprising a modified Fc domain wherein residues in the Fc domain have been replaced with corresponding residues from IgA, and wherein the modified Fc domain has an amino acid sequence identity to an Fc domain from wild-type IgG1 (SEQ ID NO:1) of at least about 65%, 70%, 75%, 80%. 90% or 95%. In one embodiment, the Fc domain has an amino acid sequence identity to an Fc domain from wild-type IgG1 of at least 70%. In a preferred embodiment, the Fc domain has an amino acid sequence identity to an Fc domain from wild-type IgG1 of at least 75%

[0121] In one embodiment, the present disclosure provides an engineered IgG1 immunoglobulin comprising a number of substitutions at certain positions in the Fc domain. The numbering of all substitution positions is according to IMGT numbering for C-domain. In one embodiment, the present disclosure provides an Fc domain wherein the amino acids at positions in the CH2 domain, for example, as listed in Table 6, Table 10, Table 14 and Table 18, have been substituted with the corresponding amino acid from IgA2. In one embodiment, the present disclosure provides an Fc domain wherein the amino acids at positions in the CH3 domain, for example, as listed in Table 8, Table 12, Table 16 and Table 20, have been substituted with the corresponding amino acid from IgA2. In one embodiment, the present disclosure provides an engineered IgG1 immunoglobulin wherein the amino acid at positions in the CH2 and CH3 domains of the Fc domain, for example, as listed in Table 22, have been substituted with the corresponding amino acid from IgA2.

[0122] The modified Fc domains were incorporated into a full-length anti-HER2 antibody (VH-CH 1-hinge of amino acid sequence SEQ ID NO: 1 and light chain of SEQ ID NO: 124) and expressed in a mammalian HEK cell line. The binding affinity of the expressed immunoglobulin variants was determined using surface plasmon resonance using a BIAcore® T200 instrument (GE Healthcare). In one embodiment, the present disclosure provides an engineered IgG1 immunoglobulin comprising amino acid substitutions in the CH2 domain, wherein the amino acids have been substituted with the corresponding amino acid from IgA2, and wherein the engineered immunoglobulin binds to human FcαRI with a binding affinity as listed in Table 7, Table 11, Table 15 and Table 19. In one embodiment, the present disclosure provides an engineered IgG1 immunoglobulin comprising amino acid substitutions in the CH3 domain, wherein the amino acids have been substituted with the corresponding amino acid from IgA2, and wherein the engineered immunoglobulin binds to human FcαRI with a binding affinity as listed in Table 9, Table 13, Table 17 and Table 21. In one embodiment, the present disclosure provides an engineered IgG1 immunoglobulin comprising amino acid substitutions in the CH2 and CH3 domains of the Fc domain, wherein the amino acids have been substituted with the corresponding amino acid from IgA2, and wherein the engineered immunoglobulin binds to human FcαRI with a binding affinity as listed in Table 23 and Table 24.

[0123] A selection of the engineered IgG1 immunoglobulins with modifications to the CH2 and CH3 domains of the Fc domain were tested in ADCC and ADCP cell killing assays following the procedure described in Examples 6 and 7, respectively. The results are shown in FIG. 10, FIG. 11 and FIG. 12 and indicate that the engineered IgG1 immunoglobulins performed as well as the wild-type immunoglobulins.

[0124] As described above we have generated engineered immunoglobulins in which the FcαRI binding properties of an IgA2 immunoglobulin have been transferred to an IgG1 immunoglobulin. However, the substitution of amino acids in the Fc region of IgG1 resulted in the loss of the constitutive FcRn binding properties with a resulting decrease in half-life of the IgG1 immunoglobulin. The critical residues for FcRn binding were identified and the CH3 substitutions A_CH3.15_H, F_CH3.116_Y or P_CH3.113_H, L_CH3.114_N, A_CH3.115_H, F_CH3.116_Y (IMGT numbering for C-domain) were made in an IgA2 immunoglobulin. With these mutations, FcRn binding was restored; however since key residues of IgG1 CH3 that interact with FcRn are located in the corresponding region of IgA2 CH3 that is responsible for FcαRI interactions it was not possible to engineer these residues back to those from IgG1 without losing some of the FcαRI binding as shown in Table 25.

[0125] Furthermore, the substitution of amino acids in the Fc region of IgG1 to confer FcαRI binding resulted in the loss of the constitutive FcγR binding properties of the engineered IgG1 immunoglobulin. Amino acid modifications were introduced in the CH2 domain of the engineered IgG1 immunoglobulin to restore FcγR effector function. Mutations to the CH2 domain, for example the ‘SDIE’ mutation of S239D and 1332E/S_CH2.3_D and I_CH2.117_E or the triple mutation S239D, 1332E and A330L/S_CH2.3_D, l_CH2.117_E and A_CH2.115_L (EU/IMGT numbering for C-domain; Lazar et al (2006) PNAS USA 103(11): 4005-10) have been described for improving FcγR effector function. In an embodiment of the present disclosure, the SDIE mutation was made in the CH2 domain of an engineered IgG1 immunoglobulin comprising mutations to confer binding to FcαRI, as set out in Table 26. In combination, these mutations were sufficient to partially restore FcγR effector function.

[0126] The binding affinity of the engineered IgG1 immunoglobulins comprising amino acid modifications to restore binding to human FcαRI and binding to human FcγRI and FcγRIIIa was determined by SPR. In one embodiment, the present disclosure provides an engineered IgG1 immunoglobulin comprising amino acid substitutions in the Fc domain, wherein the engineered immunoglobulin binds to human FcαRI, FcγRI and FcγRIIIa with a binding affinity as listed in Table 27, Table 28 and Table 29, respectively. Effector function of a number of engineered IgG1 immunoglobulins was tested in an in vitro PMN/PBMC killing assay and an ADCP assay with the results shown in FIGS. 13-16.

[0127] 2. Engineered Heterodimeric Immunoglobulins Recruiting FcαR Function, FcγR Function and FcRn Binding

[0128] The protein engineering work described above resulted in the generation of engineered homodimeric immunoglobulins with the properties of binding FcαRs, FcγRs and FcRn. However, binding to one class of Fc receptors was often at the expense of binding to another class and further optimization work was required. Therefore, to generate an optimized engineered immunoglobulin, a heterodimeric Fc region was generated in which a first Fc domain of an IgG1 Fc region was engineered to recruit FcαRI and a second Fc domain of an IgG1 Fc region remained unchanged. A second aspect of the present invention provides an engineered IgG1 immunoglobulin comprising a heterodimeric Fc region that can recruit both FcαRI and FcγR function and bind to FcRn. When residues spatially located on top of CH2 of the engineered immunoglobulin were derived from IgG1, no further amino acid modifications were required in the heterodimeric Fc region to restore FcRn binding. Therefore, in one embodiment, an engineered IgG1 immunoglobulin is provided comprising residues from IgG1 spatially located on top of CH2. In another embodiment, to fully restore FcγR effector function, the double mutation S239D/I332E (EU numbering)/S_CH2.3_D/I_CH2.117_E (IMGT numbering for C-domain) was made in the CH2 domain of the second Fc domain derived from IgG1. In another embodiment, when residues spatially located on top of the CH2 were derived from IgA2, for example, packed loops and disulfide bonds, the addition of the ‘LS’ or ‘YTE’ mutation was required to restore FcRn binding; however binding to FcγR was lost.

[0129] To ensure adequate heterodimerization of the two Fc domains of the Fc region of the engineered immunoglobulins of the present disclosure, a variety of approaches can be used in to enhance dimerization, as described in e.g. EP1870459; U.S. Pat. Nos. 5,582,996; 5,731,168; 5,910,573; 5,932,448; 6,833,441; 7,183,076; US2006204493A1; WO 09/089004A1. In one aspect, one or more mutations to a first Fc domain of the engineered immunoglobulin comprising a heavy chain constant domain creates a “knob” and the one or more mutations to a second Fc domain of the engineered immunoglobulin comprising a heavy chain constant domain creates a “hole,” such that heterodimerization of the first and second Fc domains causes the “knob” to interface (e.g., interact, e.g., a CH2 domain of a first Fc domain interacting with a CH2 domain of a second Fc domain, or a CH3 domain of a first Fc domain interacting with a CH3 domain of a second Fc domain) with the “hole”. As the term is used herein, a “knob” refers to at least one amino acid side chain which projects from the interface of a first Fc domain of the engineered immunoglobulin comprising a heavy chain constant domain and is therefore positionable in a compensatory “hole” in the interface with a second Fc domain of the engineered immunoglobulin comprising a heavy chain constant domain so as to stabilize the heterodimer, and thereby favour heterodimeric formation over homodimeric formation, for example. The preferred import residues for the formation of a knob are generally naturally occurring amino acid residues and are preferably selected from arginine (R), phenylalanine (F), tyrosine (Y) and tryptophan (\A). Most preferred are tryptophan and tyrosine. In the preferred embodiment, the original residue for the formation of the protuberance has a small side chain volume, such as alanine, asparagine, aspartic acid, glycine, serine, threonine or valine.

[0130] A “hole” refers to at least one amino acid side chain which is recessed from the interface of a second Fc domain of the engineered immunoglobulin comprising a heavy chain constant domain and therefore accommodates a corresponding knob on the adjacent interfacing surface of a first Fc domain of the engineered immunoglobulin comprising a heavy chain constant domain. The preferred import residues for the formation of a hole are usually naturally occurring amino acid residues and are preferably selected from alanine (A), serine (S), threonine (T) and valine (V). Most preferred are serine, alanine or threonine. In the preferred embodiment, the original residue for the formation of the hole has a large side chain volume, such as tyrosine, arginine, phenylalanine or tryptophan.

[0131] In one embodiment, a first CH3 domain is mutated at residue 366, 405 or 407 (EU numbering)/, CH3.22, CH3.85.1, CH3.86 (IMGT numbering for C-domain) to create either a “knob” or a hole” (as described above), and the second CH3 domain that heterodimerizes with the first CH3 domain is mutated at: residue 407/CH3.86 if residue 366/CH3.22 is mutated in the first CH3 domain, residue 394/CH3.81 if residue 405/CH3.85.1 is mutated in the first CH3 domain, or residue 366/CH3.22 if residue 407/CH3.86 is mutated in the first CH3 domain (EU/IMGT numbering for C-domain), to create a “hole” or “knob” complementary to the “knob” or “hole” of the first CH3 domain.

[0132] In another embodiment, a first CH3 domain is mutated at residue 366/CH3.22 to create either a “knob” or a “hole” (as described above), and the second CH3 domain that heterodimerizes with the first CH3 domain is mutated at residues 366/CH3.22, 368/CH3.24 and/or 407/CH3.86 (EU/IMGT numbering for C-domain), to create a “hole” or “knob” complementary to the “knob” or “hole” of the first CH3 domain. In one embodiment, the mutation to the first CH3 domain introduces a tyrosine (Y) residue at position 366/CH3.22. In an embodiment, the mutation to the first CH3 is T366Y/T_CH3.22_Y. In one embodiment, the mutation to the first CH3 domain introduces a tryptophan (W) residue at position 366/CH3.22. In an embodiment, the mutation to the first CH3 is T366W/T_CH3.22_W. In embodiments, the mutation to the second CH3 domain that heterodimerizes with the first CH3 domain mutated at position 366/CH3.22 (e.g., has a tyrosine (Y) or tryptophan (N) introduced at position 366/CH3.22, e.g., comprises the mutation T366Y/T_CH3.22_Y or T366W/T_CH3.22_VV), comprises a mutation at position 366/CH3.22, a mutation at position 368/CH3.24 and a mutation at position 407/CH3.86 (EU/IMGT numbering for C-domain). In embodiments, the mutation at position 366/CH3.22 introduces a serine (S) residue, the mutation at position 368/CH3.22 introduces an alanine (A), and the mutation at position 407/CH3.86 introduces a valine (V). In embodiments, the mutations comprise T366S, L368A and Y407V/T_CH3.22_S, L_CH3.24_A and Y_CH3.86_V (EU/IMGT numbering)). In one embodiment the first CH3 domain of the multi-specific binding molecule comprises the mutation T366Y/T_CH3.22_Y, and the second CH3 domain that heterodimerizes with the first CH3 domain comprises the mutations T366S, L368A and Y407V (T_CH3.22_S, L_CH3.24_A and Y_CH3.86_V), or vice versa. In one embodiment the first CH3 domain of the multi-specific binding molecule comprises the mutation T366W/T_CH3.22_W, and the second CH3 domain that heterodimerizes with the first CH3 domain comprises the mutations T366S, L368A and Y407V/T_CH3.22_S, L_CH3.24_A and Y_CH3.86_V, or vice versa.

[0133] In a preferred embodiment, the CH3 domain that is mutated to create a “hole” is in a first Fc domain of the Fc region of an engineered IgG1 immunoglobulin that comprises amino acid modifications for recruiting FcαRI effector function and the CH3 domain that is mutated to create a “knob” is in a second Fc domain of the Fc region of an engineered IgG1 immunoglobulin that does not comprise amino acid modifications for recruiting FcαRI effector function. In one embodiment, the present disclosure provides an engineered IgG1 immunoglobulin comprising an Fc ‘hole’ domain with an amino acid sequence comprised within SEQ ID NO: 137 or 157. In another embodiment, the present disclosure provides an engineered IgG1 immunoglobulin comprising an Fc ‘knob’ domain with an amino acid sequence comprised within SEQ ID NO: 154, 159, 160, 161 or 162. In a preferred embodiment the present disclosure provides an engineered IgG1 immunoglobulin with a first and second Fc domain from amino acid sequences selected from: SEQ ID NO: 137 or 157 with SEQ ID NO: 154, 159, 160, 161 or 162. The engineered IgG1 immunoglobulin with a first and second Fc domain from amino acid sequences SEQ ID NO: 157 and 159, respectively was preferred if gamma effector function (i.e. binding to FcγRs) was not required. The engineered IgG1 immunoglobulin with a first and second Fc domain from amino acid sequences SEQ ID NO: 157 and 161, respectively was preferred if gamma effector function (i.e. binding to FcγRs) was required. The second Fc domain of this engineered IgG1 immunoglobulin (SEQ ID NO: 161) also comprised the SDIE mutations. Furthermore, the first Fc domain of the engineered IgG1 immunoglobulins comprised within SEQ ID NO: 157 comprised mutations derived from the affinity maturation campaign to improve binding to FcαRI.

[0134] Additional knob in hole mutation pairs suitable for use in any of the engineered immunoglobulins of the present disclosure are further described in, for example, WO1996/027011, and Merchant et al., (1998) supra, the contents of which are hereby incorporated by reference in their entirety.

[0135] Further Modifications to Engineered Immunoglobulins

[0136] To further enhance binding affinity of the engineered IgG1 immunoglobulins to FcαRI, an affinity maturation campaign was carried out using yeast display to identify amino acids mutations that enhanced IgA2 affinity for FcαRI. In one embodiment, the present disclosure provides an engineered IgG1 immunoglobulin comprising an amino acid mutation in the CH2 domain and/or CH3 domain at one or more of the following positions: CH2.10, CH2.89, CH2.91, CH2.94, CH2.97, CH2.99, CH3.45, CH3.105, CH3.109, CH3.118 and/or CH3.124, wherein numbering is according to IMGT numbering for C-domain. In a one embodiment, the present disclosure provides an engineered IgG1 immunoglobulin comprising an amino acid substitution in the CH2 domain and/or CH3 domain selected from the group consisting of: A_CH2.10_S, L_CH2.89_I, G_CH2.91_Q, G_CH2.91_V, Q_CH2.94_E, N_CH2.97_H, N_CH2.97_Y, G_CH2.99_W, S_CH3.45_D, M_CH3.105_Y, E_CH3.109_D, Q_CH3.118_Y and L_CH3.124_F, wherein numbering is according to IMGT numbering for C-domains. In another embodiment, the present disclosure provides an engineered IgG1 immunoglobulin comprising an amino acid substitution in the CH2 domain and/or CH3 domain selected from one of the mutation sets listed in Table 39. In one embodiment, the present disclosure provides an engineered IgG1 immunoglobulin comprising the following amino acid substitutions: Q_CH2.94_E, N_CH2.97_Y, S_CH3.45_D, M_CH3.105_Y, Q_CH3.118_Y (IMGT numbering for C-domain). In a preferred embodiment, the present disclosure provides an engineered IgG1 immunoglobulin comprising the following amino acid substitutions: Q_CH2.94_E, L_CH2.97_Y and S_CH3.45_D (IMGT numbering for C-domain). This mutation set was applied to the ‘hole’ arm of a heterodimeric Fc comprised within SEQ ID NO: 157 resulting in SEQ ID NO: 252. The engineered IgG1 immunoglobulins with a first and second Fc domain from amino acid sequences selected from and comprised within SEQ ID 252 and 159 or SEQ ID 252 and 161 were shown to have better killing properties on SK-BR-3 cells in PMN killing assays, compared to their parental immunoglobulins and IgA2 (FIG. 24). The engineered IgG1 immunoglobulin with a first and second Fc domain from amino acid sequences SEQ ID NO: 252 and 159, respectively was preferred if gamma effector function (i.e. binding to FcγRs) was not required. The engineered IgG1 immunoglobulin with a first and second Fc domain from amino acid sequences SEQ ID NO: 252 and 161, respectively was preferred if gamma effector function (i.e. binding to FcγRs) was required. The second Fc domain of the engineered IgG1 immunoglobulin comprised within SEQ ID NO: 161 also comprised the SDIE mutations.

[0137] In any of the embodiments described herein, the CH3 domains may be additionally mutated to introduce a pair of cysteine residues. Without being bound by theory, it is believed that the introduction of a pair of cysteine residues capable of forming a disulfide bond provides stability to the heterodimeric engineered immunoglobulins. In embodiments, a first CH3 domain comprises a cysteine at position 354/CH3.10 (EU/IMGT numbering for C-domain), and a second CH3 domain that heterodimerizes with the first CH3 domain comprises a cysteine at position 349/CH3.5 (EU/IMGT numbering for C-domain).

[0138] In another aspect, heterodimerization of the Fc domains of the engineered immunoglobulins is increased by introducing mutations based on the “polar-bridging” rational, which causes residues at the binding interface of the two Fc domains to interact with residues of similar (or complimentary) physical property in the heterodimer configuration. In particular, these mutations are designed so that, in the heterodimer formation, polar residues interact with polar residues, while hydrophobic residues interact with hydrophobic residues. In contrast, in the homodimer formation, residues are mutated so that polar residues interact with hydrophobic residues. The favorable interactions in the heterodimer configuration and the unfavorable interactions in the homodimer configuration work together to make it more likely for CH3 domains to form heterodimers than to form homodimers.

[0139] In an exemplary embodiment, the above mutations are generated at one or more positions of residues 364, 366, 368, 399, 405, 407, 409, and 411 in a CH3 domain (IMGT numbering for C-domain)/CH3.20, CH3.22, CH3.24, CH3.84.2, CH3.85.1, CH3.86, CH3.88, CH3.90 (IMGT numbering for C-domain). In one aspect, one CH3 domain has one or more mutations selected from a group consisting of: S364L, T366V, L368Q, D399L, F405S, K409F and T411K/S_CH3.20_L, T_CH3.22_V, L_CH3.24_Q, D_CH3.84.2_L, F_CH3.85.1_S, K_CH3.88_F, T_CH3.90_K (EU/IMGT numbering for C-domain), while the other CH3 domain has one or more mutations selected from a group consisting of: Y407F, K409Q and T411D/Y_CH3.86_F, K_CH3.88_Q and T_CH3.90_D (EU/IMGT numbering). The polar bridge strategy is described in, for example, WO2006/106905, WO2009/089004 and Gunasekaran K et al., (2010) J Biol Chem., 285: 19637-19646, the contents of which are hereby incorporated by reference in their entirety.

[0140] The amino acid replacements described herein are introduced into the CH3 domains using techniques which are known in the art. Normally the DNA encoding the heavy chain(s) is genetically engineered using the techniques described in Mutagenesis: a Practical Approach. Oligonucleotide-mediated mutagenesis is a preferred method for preparing substitution variants of the DNA encoding the two hybrid heavy chains. This technique is known in the art as described by Adelman et al., (1983) DNA, 2:183.

[0141] Conjugates

[0142] The present disclosure includes engineered immunoglobulins (e.g., antibodies) or fragments thereof recombinantly fused or chemically conjugated (including both covalent and non-covalent conjugations) to a heterologous protein or polypeptide (or fragment thereof, preferably to a polypeptide of at least 10, at least 20, at least 30, at least 40, at least 50, at least 60, at least 70, at least 80, at least 90 or at least 100 amino acids) to generate fusion proteins. Methods for fusing or conjugating proteins, polypeptides, or peptides to an antibody or an antibody fragment are known in the art. See, e.g., U.S. Pat. Nos. 5,336,603, 5,622,929, 5,359,046, 5,349,053, 5,447,851, and 5,112,946; EP 307434 and EP 367166; WO 96/04388 and WO 91/06570; Ashkenazi et al., (1991) PNAS. USA 88:10535-10539; Zheng et al., (1995) J. Immunol. 154: 5590-5600; and Vil et al., (1992) PNAS. USA 89:11337-11341.

[0143] Additional fusion proteins may be generated through the techniques of gene-shuffling, motif-shuffling, exon-shuffling, and/or codon-shuffling (collectively referred to as “DNA shuffling”). DNA shuffling may be employed to alter the activities of molecules of the disclosure or fragments thereof (e.g., molecules or fragments thereof with higher affinities and lower dissociation rates). See, generally, U.S. Pat. Nos. 5,605,793, 5,811,238, 5,830,721, 5,834,252, and 5,837,458; Patten et al., (1997) Curr. Opinion Biotechnol. 8:724-33; Harayama (1998) Trends Biotechnol. 16(2):76-82; Hansson et al., (1999) J. Mol. Biol. 287: 265-76; and Lorenzo & Blasco (1998) Biotechniques, 24(2):308-313 (each of these patents and publications are hereby incorporated by reference in its entirety). The molecules described herein or fragments thereof may be altered by being subjected to random mutagenesis by error-prone PCR, random nucleotide insertion or other methods prior to recombination. A polynucleotide encoding a fragment of the present molecule may be recombined with one or more components, motifs, sections, parts, domains, fragments, etc. of one or more heterologous molecules.

[0144] Moreover, the engineered immunoglobulins of the present disclosure can be fused to marker sequences, such as a peptide to facilitate purification. In preferred embodiments, the marker amino acid sequence is a hexa-histidine peptide (SEQ ID NO: 255), such as the tag provided in a pQE vector (QIAGEN, Inc., 9259 Eton Avenue, Chatsworth, Calif., 91311), among others, many of which are commercially available. As described in Gentz et al., (1989) PNAS. USA 86:821-824, for instance, hexa-histidine (SEQ ID NO: 255) provides for convenient purification of the fusion protein. Other peptide tags useful for purification include, but are not limited to, the hemagglutinin (“HA”) tag, which corresponds to an epitope derived from the influenza hemagglutinin protein (Wilson et al., (1984) Cell 37:767), and the “flag” tag.

[0145] In other embodiments, the engineered immunoglobulins of the present disclosure are conjugated to a diagnostic or detectable agent. Such molecules can be useful for monitoring or prognosing the onset, development, progression and/or severity of a disease or disorder as part of a clinical testing procedure, such as determining the efficacy of a particular therapy. Such diagnosis and detection can accomplished by coupling the molecules to detectable substances including, but not limited to, various enzymes, such as, but not limited to, horseradish peroxidase, alkaline phosphatase, beta-galactosidase, or acetylcholinesterase; prosthetic groups, such as, but not limited to, streptavidin/biotin and avidin/biotin; fluorescent materials, such as, but not limited to, umbelliferone, fluorescein, fluorescein isothiocynate, rhodamine, dichlorotriazinylamine fluorescein, dansyl chloride or phycoerythrin; luminescent materials, such as, but not limited to, luminol; bioluminescent materials, such as but not limited to, luciferase, luciferin, and aequorin; radioactive materials, such as, but not limited to, iodine (131I, 125I, 123I, and 121I,), carbon (14C), sulfur (35S), tritium (3H), indium (115In, 113In, 112In, and 111In,), technetium (99Tc), thallium (201Ti), gallium (68Ga, 67Ga), palladium (103Pd), molybdenum (99Mo), xenon (133Xe), fluorine (18F), 153Sm, 177Lu, 159Gd, 149Pm, 140La, 175Yb, 166Ho, 90Y, 47Sc, 186Re, 188Re, 142 Pr, 105Rh, 97Ru, 68Ge, 57Co, 65Zn, 85Sr, 32P, 153Gd, 169Yb, 51Cr, 54Mn, 75Se, 113Sn, and 117Tin; and positron emitting metals using various positron emission tomographies, and nonradioactive paramagnetic metal ions.

[0146] The present application further encompasses uses of the engineered immunoglobulins of the present disclosure conjugated to a therapeutic moiety. For example, the therapeutic moiety may be a cytotoxin, e.g., a cytostatic or cytocidal agent, a therapeutic agent or a radioactive metal ion, e.g., alpha-emitters. A cytotoxin or cytotoxic agent includes any agent that is detrimental to cells.

[0147] Furthermore, the engineered immunoglobulin may be conjugated to a therapeutic moiety or drug moiety that modifies a given biological response. For example, the drug moiety may be a protein, peptide, or polypeptide possessing a desired biological activity. Such proteins may include, for example, a toxin such as abrin, ricin A, pseudomonas exotoxin, cholera toxin, or diphtheria toxin; a protein such as tumor necrosis factor, α-interferon, β-interferon, nerve growth factor, platelet derived growth factor, tissue plasminogen activator, an apoptotic agent, an anti-angiogenic agent; or, a biological response modifier such as, for example, a lymphokine.

[0148] For further discussion of types of cytotoxins, linkers and methods for conjugating therapeutic agents to the engineered immunoglobulin, see also Saito et al., (2003) Adv. Drug Deliv. Rev. 55:199-215; Trail et al., (2003) Cancer Immunol. Immunother. 52: 328-337; Payne (2003) Cancer Cell 3: 207-212; Allen (2002) Nat. Rev. Cancer, 2:750-763; Pastan & Kreitman (2002) Curr. Opin. Investig. Drugs, 3: 1089-1091; Senter & Springer (2001) Adv. Drug Deliv. Rev. 53: 247-264.

[0149] The engineered immunoglobulins of the present disclosure also can be conjugated to a radioactive isotope to generate cytotoxic radiopharmaceuticals, also referred to as radioimmunoconjugates. Examples of radioactive isotopes that can be conjugated to engineered immunoglobulins for use diagnostically or therapeutically include, but are not limited to, iodinel3l, indium111, yttrium90, and lutetium177. Method for preparing radioimmunconjugates are established in the art. See, e.g., Denardo et al., (1998) Clin Cancer Res. 4(10): 2483-90; Peterson et al., (1999) Bioconjug. Chem. 10(4):553-7; and Zimmerman et al., (1999) Nucl. Med. Biol. 26(8): 943-50, each incorporated by reference in their entireties.

[0150] Techniques for conjugating therapeutic moieties to engineered immunoglobulins such as antibodies or antibody-like molecules are known, see, e.g., Arnon et al., “Monoclonal Antibodies for Immunotargeting of Drugs in Cancer Therapy”, in Monoclonal Antibodies and Cancer Therapy, Reisfeld et al. (eds.), pp. 243-56 (Alan R. Liss, Inc. 1985); Hellstrom et al., “Antibodies For Drug Delivery”, in Controlled Drug Delivery (2nd Ed.), Robinson et al. (eds.), pp. 623-53 (Marcel Dekker, Inc. 1987); Thorpe, “Antibody Carriers of Cytotoxic Agents in Cancer Therapy: A Review”, in Monoclonal Antibodies 84: Biological and Clinical Applications, Pinchera et al. (eds.), pp. 475-506 (1985); “Analysis, Results, and Future Prospective of the Therapeutic Use of Radiolabeled Antibody in Cancer Therapy”, in Monoclonal Antibodies for Cancer Detection and Therapy, Baldwin et al. (eds.), pp. 303-16 (Academic Press 1985), and Thorpe et al., (1982) Immunol. Rev. 62:119-58.

[0151] The engineered immunoglobulins may also be attached to solid supports, which are particularly useful for immunoassays or purification of the target antigen. Such solid supports include, but are not limited to, glass, cellulose, polyacrylamide, nylon, polystyrene, polyvinyl chloride or polypropylene.

[0152] Methods of Making the Engineered Immunoglobulins

[0153] Preparing Polypeptide Chains

[0154] Antibodies or immunoglobulins and fragments thereof can be produced by a variety of techniques, including conventional monoclonal antibody methodology e.g., the standard somatic cell hybridization technique of Kohler and Milstein, (1975) Nature 256: 495. Many techniques for producing monoclonal antibody can be employed e.g., viral or oncogenic transformation of B lymphocytes.

[0155] An animal system for preparing hybridomas is the murine system. Hybridoma production in the mouse is an established procedure. Immunization protocols and techniques for isolation of immunized splenocytes for fusion are known in the art. Fusion partners (e.g., murine myeloma cells) and fusion procedures are also known.

[0156] Chimeric or humanized antibodies can be prepared based on the sequence of a murine monoclonal antibody prepared as described above. DNA encoding the heavy and light chain immunoglobulins can be obtained from the murine hybridoma of interest and engineered to contain non-murine (e.g., human) immunoglobulin sequences using standard molecular biology techniques. For example, to create a chimeric antibody, the murine variable regions can be linked to human constant regions using methods known in the art (see e.g., U.S. Pat. No. 4,816,567 to Cabilly et al.). To create a humanized antibody, the murine CDR regions can be inserted into a human framework using methods known in the art. See e.g., U.S. Pat. No. 5,225,539 to Winter, and U.S. Pat. Nos. 5,530,101; 5,585,089; 5,693,762 and U.S. Pat. No. 6,180,370 to Queen et al.

[0157] In a certain embodiment, the antibody or immunoglobulins of the disclosure are human monoclonal antibodies. Such human monoclonal antibodies can be generated using transgenic or transchromosomic mice carrying parts of the human immune system rather than the mouse system. These transgenic and transchromosomic mice include mice referred to herein as HUMAB mice and KM mice, respectively, and are collectively referred to herein as “human Ig mice.”

[0158] The HUMAB mouse (Medarex, Inc.) contains human immunoglobulin gene miniloci that encode un-rearranged human heavy (μ and γ) and K light chain immunoglobulin sequences, together with targeted mutations that inactivate the endogenous μ and κ chain loci (see e.g., Lonberg, et al., (1994) Nature 368(6474): 856-859). Accordingly, the mice exhibit reduced expression of mouse IgM or κ, and in response to immunization, the introduced human heavy and light chain transgenes undergo class switching and somatic mutation to generate high affinity human IgGK monoclonal (Lonberg et al., (1994) supra; reviewed in Lonberg, (1994) Handbook of Experimental Pharmacology 113:49-101; Lonberg & Huszar, (1995) Intern. Rev. Immunol. 13: 65-93, and Harding & Lonberg, (1995) Ann. N. Y. Acad. Sci. 764:536-546). The preparation and use of HUMAB mice, and the genomic modifications carried by such mice, is further described in Taylor et al., (1992) Nucleic Acids Research 20:6287-6295; Chen Y., (1993) International Immunology 5: 647-656; Tuaillon Y., (1993) PNAS USA 94:3720-3724; Choi Y., (1993) Nature Genetics 4:117-123; Chen Y., (1993) EMBO J. 12:821-830; Tuaillon et al., (1994) J. Immunol. 152:2912-2920; Taylor Y., (1994) International Immunology 579-591; and Fishwild Y., (1996) Nature Biotechnology 14: 845-851, the contents of all of which are hereby specifically incorporated by reference in their entirety. See further, U.S. Pat. Nos. 5,545,806; 5,569,825; 5,625,126; 5,633,425; 5,789,650; 5,877,397; 5,661,016; 5,814,318; 5,874,299; and 5,770,429; all to Lonberg & Kay; U.S. Pat. No. 5,545,807 to Surani et al.; WO 92/103918, WO 93/12227, WO 94/25585, WO 97/113852, WO 98/24884 and WO 99/45962, all to Lonberg & Kay; and WO 01/14424 to Korman et al.

[0159] In another embodiment, human antibodies or immunoglobulins used in the present disclosure can be raised using a mouse that carries human immunoglobulin sequences on transgenes and transchomosomes such as a mouse that carries a human heavy chain transgene and a human light chain transchromosome. Such mice, referred to herein as “KM mice”, are described in detail in WO 02/43478 (Ishida et al).

[0160] Still further, alternative transgenic animal systems expressing human immunoglobulin genes are available in the art and can be used to raise human antibodies. For example, an alternative transgenic system referred to as the Xenomouse (Abgenix, Inc.) can be used. Such mice are described in, e.g., U.S. Pat. Nos. 5,939,598; 6,075,181; 6,114,598; 6,150,584 and 6,162,963 (Kucherlapati et al).

[0161] Moreover, alternative transchromosomic animal systems expressing human immunoglobulin genes are available in the art and can be used to raise the human antibodies or immunoglobulins of the disclosure. For example, mice carrying both a human heavy chain transchromosome and a human light chain tranchromosome, referred to as “TC mice” can be used; such mice are described in Tomizuka et al., (2000) PNAS USA 97:722-727. Furthermore, cows carrying human heavy and light chain transchromosomes have been described in the art (Kuroiwa (2002) Nature Biotechnology 20:889-894) and can be used to raise human antibodies used in the present application.

[0162] Human monoclonal antibodies can also be prepared using phage display methods for screening libraries of human immunoglobulin genes. Such phage display methods for isolating human antibodies are established in the art or described in the examples below. See for example: U.S. Pat. Nos. 5,223,409; 5,403,484; and U.S. Pat. No. 5,571,698 (Ladner et al); U.S. Pat. Nos. 5,427,908 and 5,580,717 (Dower et al); U.S. Pat. Nos. 5,969,108 and 6,172,197 (McCafferty et al); and U.S. Pat. Nos. 5,885,793; 6,521,404; 6,544,731; 6,555,313; 6,582,915 and U.S. Pat. No. 6,593,081 (Griffiths et al).

[0163] Human monoclonal antibodies used in the disclosure can also be prepared using SCID mice into which human immune cells have been reconstituted such that a human antibody response can be generated upon immunization. Such mice are described in, for example, U.S. Pat. Nos. 5,476,996 and 5,698,767 (Wilson et al).

[0164] In one embodiment, the present disclosure provides an antibody that has be generated by any of the aforementioned methods comprising at least one modified Fc domain as described herein.

[0165] Nucleic Acids and Expression Systems

[0166] The present invention also encompasses nucleic acids encoding the polypeptide chains, Fc domains or Fc regions of the engineered immunoglobulins described herein. Nucleic acid molecules of the disclosure include DNA and RNA in both single-stranded and double-stranded form, as well as the corresponding complementary sequences. The nucleic acid molecules of the disclosure include full-length genes or cDNA molecules as well as a combination of fragments thereof. The nucleic acids of the disclosure are derived from human sources but can include those derived from non-human species.

[0167] An “isolated nucleic acid” is a nucleic acid that has been separated from adjacent genetic sequences present in the genome of the organism from which the nucleic acid was isolated, in the case of nucleic acids isolated from naturally-occurring sources. In the case of nucleic acids synthesized enzymatically from a template or chemically, such as PCR products, cDNA molecules, or oligonucleotides for example, it is understood that the nucleic acids resulting from such processes are isolated nucleic acids. An isolated nucleic acid molecule refers to a nucleic acid molecule in the form of a separate fragment or as a component of a larger nucleic acid construct. In one preferred embodiment, the nucleic acids are substantially free from contaminating endogenous material. The nucleic acid molecule has preferably been derived from DNA or RNA isolated at least once in substantially pure form and in a quantity or concentration enabling identification, manipulation, and recovery of its component nucleotide sequences by standard biochemical methods (such as those outlined in Sambrook et al., Molecular Cloning: A Laboratory Manual, 2nd ed., Cold Spring Harbor Laboratory, Cold Spring Harbor, N.Y. (1989)). Such sequences are preferably provided and/or constructed in the form of an open reading frame uninterrupted by internal non-translated sequences, or introns, that are typically present in eukaryotic genes. Sequences of non-translated DNA can be present 5′ or 3′ from an open reading frame, where the same do not interfere with manipulation or expression of the coding region.

[0168] Variant sequences can be prepared by site specific mutagenesis of nucleotides in the DNA encoding the polypeptide, using cassette or PCR mutagenesis or other techniques well known in the art, to produce DNA encoding the variant, and thereafter expressing the recombinant DNA in cell culture as outlined herein.

[0169] As “optimized nucleotide sequence” means a nucleotide sequence has been altered to encode an amino acid sequence using codons that are preferred in the production cell, for example, a Chinese Hamster Ovary cell (CHO). The optimized nucleotide sequence is engineered to retain completely the amino acid sequence originally encoded by the starting nucleotide sequence, which is also known as the “parental” sequence.

[0170] The present disclosure also provides expression systems and constructs in the form of plasmids, expression vectors, transcription or expression cassettes which comprise at least one polynucleotide as above. In addition, the disclosure provides host cells comprising such expression systems or constructs. The heavy and light chains of an engineered IgG1 immunoglobulin or fragment thereof can be encoded by a single nucleic acid (e.g., inserted into a single vector), or can be encoded by multiple nucleic acid molecules, e.g., two nucleic acid molecules (also referred to as a “set”), which can be inserted into multiple vectors (e.g., two vectors, i.e., a set of vectors).

[0171] In one embodiment, the present invention provides a method of preparing an engineered IgG1 immunoglobulin or fragment thereof comprising an Fc region comprising modified first and second Fc domains, the method comprising the steps of: (a) culturing a host cell comprising a nucleic acid encoding a heavy chain comprising the engineered Fc domain polypeptide and a nucleic acid comprising a light chain polypeptide, wherein the cultured host cell expresses the engineered polypeptides; and (b) recovering the engineered IgG1 immunoglobulin from the host cell culture.

[0172] Expression vectors of use in the present disclosure may be constructed from a starting vector such as a commercially available vector. After the vector has been constructed and a nucleic acid molecule encoding polypeptide chains of the engineered immunoglobulin has been inserted into the proper site of the vector, the completed vector may be inserted into a suitable host cell for amplification and/or polypeptide expression. The transformation of an expression vector into a selected host cell may be accomplished by known methods including transfection, infection, calcium phosphate co-precipitation, electroporation, microinjection, lipofection, DEAE-dextran mediated transfection, or other known techniques. The method selected will in part be a function of the type of host cell to be used. These methods and other suitable methods are well known to the skilled artisan, and are set forth, for example, in Sambrook et al., 2001, supra.

[0173] Typically, expression vectors used in the host cells will contain sequences for plasmid maintenance and for cloning and expression of exogenous nucleotide sequences. Such sequences, collectively referred to as ‘flanking sequences’, in certain embodiments will typically include one or more of the following nucleotide sequences: a promoter, one or more enhancer sequences, an origin of replication, a transcriptional termination sequence, a complete intron sequence containing a donor and acceptor splice site, a sequence encoding a leader sequence for polypeptide secretion, a ribosome binding site, a polyadenylation sequence, a polylinker region for inserting the nucleic acid encoding the polypeptide to be expressed, and a selectable marker element.

[0174] A host cell, when cultured under appropriate conditions, can be used to express bispecific antibody that can subsequently be collected from the culture medium (if the host cell secretes it into the medium) or directly from the host cell producing it (if it is not secreted). The selection of an appropriate host cell will depend upon various factors, such as desired expression levels, polypeptide modifications that are desirable or necessary for activity (such as glycosylation or phosphorylation) and ease of folding into a biologically active molecule. A host cell may be eukaryotic or prokaryotic.

[0175] Mammalian cell lines available as hosts for expression are well known in the art and include, but are not limited to, immortalized cell lines available from the American Type Culture Collection (ATCC) and any cell lines used in an expression system known in the art can be used to make polypeptides comprising the engineered immunoglobulins of the present disclosure. In general, host cells are transformed with a recombinant expression vector that comprises DNA encoding a desired engineered immunoglobulin. Among the host cells that may be employed are prokaryotes, yeast or higher eukaryotic cells. Prokaryotes include gram negative or gram positive organisms, for example E. coli or bacilli. Higher eukaryotic cells include insect cells and established cell lines of mammalian origin. Examples of suitable mammalian host cell lines include the COS-7 cells, L cells, C127 cells, 3T3 cells, Chinese hamster ovary (CHO) cells, or their derivatives and related cell lines which grow in serum free media, HeLa cells, BHK cell lines, the CVIIEBNA cell line, human embryonic kidney cells such as 293, 293 EBNA or MSR 293, human epidermal A431 cells, human Colo205 cells, other transformed primate cell lines, normal diploid cells, cell strains derived from in vitro culture of primary tissue, primary explants, HL-60, U937, HaK or Jurkat cells. Optionally, mammalian cell lines such as HepG2/3B, KB, NIH 3T3 or S49, for example, can be used for expression of the polypeptide when it is desirable to use the polypeptide in various signal transduction or reporter assays. Alternatively, it is possible to produce the polypeptide in lower eukaryotes such as yeast or in prokaryotes such as bacteria. Suitable yeasts include S. cerevisiae, S. pombe, Kluyveromyces strains, Candida, or any yeast strain capable of expressing heterologous polypeptides. Suitable bacterial strains include E. coli, B. subtilis, S. typhimurium, or any bacterial strain capable of expressing heterologous polypeptides. If the engineered immunoglobulin is made in yeast or bacteria, it may be desirable to modify the product produced therein, for example by phosphorylation or glycosylation of the appropriate sites, in order to obtain a functional product. Such covalent attachments can be accomplished using known chemical or enzymatic methods.

[0176] Pharmaceutical Compositions and Dosing

[0177] Provided herein are pharmaceutical compositions comprising the engineered immunoglobulins of the present disclosure. The engineered immunoglobulin can be in combination with one or more pharmaceutically acceptable excipients, diluents or carriers.

[0178] To prepare pharmaceutical or sterile compositions comprising an engineered immunoglobulin of the present disclosure, the immunoglobulin is mixed with a pharmaceutically acceptable carrier or excipient. The phrase “pharmaceutically acceptable” means approved by a regulatory agency of a federal or a state government, or listed in the U.S. Pharmacopeia or other generally recognized pharmacopeia for use in animals, and more particularly, in humans. The term “pharmaceutical composition” refers to a mixture of at least one active ingredient (e.g., an engineered immunoglobulins of the disclosure) and at least one pharmaceutically-acceptable excipient, diluent or carrier. A “medicament” refers to a substance used for medical treatment.

[0179] Pharmaceutical compositions of therapeutic and diagnostic agents can be prepared by mixing with physiologically acceptable carriers, excipients, or stabilizers in the form of, e.g., lyophilized powders, slurries, aqueous solutions, lotions, or suspensions (see, e.g., Hardman, et al. (2001) Goodman and Gilman's The Pharmacological Basis of Therapeutics, McGraw-Hill, New York, N.Y.; Gennaro (2000) Remington: The Science and Practice of Pharmacy, Lippincott, Williams, and Wilkins, New York, N.Y.; Avis, et al. (eds.) (1993) Pharmaceutical Dosage Forms: Oral Medications, Marcel Dekker, NY; Lieberman, et al. (eds.) (1990) Pharmaceutical Dosage Forms: Tablets, Marcel Dekker, NY; Lieberman, et al. (eds.) (1990) Pharmaceutical Dosage Forms: Disperse Systems, Marcel Dekker, NY; Weiner and Kotkoskie (2000) Excipient Toxicity and Safety, Marcel Dekker, Inc., New York, N.Y.).

[0180] Selecting an administration regimen for a therapeutic depends on several factors, including the serum or tissue turnover rate of the entity, the level of symptoms, the immunogenicity of the entity, and the accessibility of the target cells in the biological matrix. In certain embodiments, an administration regimen maximizes the amount of therapeutic delivered to the patient consistent with an acceptable level of side effects. Accordingly, the amount of biologic delivered depends in part on the particular entity and the severity of the condition being treated. Guidance in selecting appropriate doses of antibodies, cytokines, and small molecules are available (see, e.g., Wawrzynczak (1996) Antibody Therapy, Bios Scientific Pub. Ltd, Oxfordshire, UK; Kresina (ed.) (1991) Monoclonal Antibodies, Cytokines and Arthritis, Marcel Dekker, New York, N.Y.; Bach (ed.) (1993) Monoclonal Antibodies and Peptide Therapy in Autoimmune Diseases, Marcel Dekker, New York, N.Y.; Baert, et al. (2003) New Engl. J. Med. 348:601-608; Milgrom, et al. (1999) New Engl. J. Med. 341:1966-1973; Slamon, et al. (2001) New Engl. J. Med. 344:783-792; Beniaminovitz, et al. (2000) New Engl. J. Med. 342:613-619; Ghosh, et al. (2003) New Engl. J. Med. 348:24-32; Lipsky, et al. (2000) New Engl. J. Med.

[0181] Determination of the appropriate dose is made by the clinician, e.g., using parameters or factors known or suspected in the art to affect treatment or predicted to affect treatment. Generally, the dose begins with an amount somewhat less than the optimum dose and it is increased by small increments thereafter until the desired or optimum effect is achieved relative to any negative side effects. Important diagnostic measures include those of symptoms of, e.g., the inflammation or level of inflammatory cytokines produced.

[0182] Actual dosage levels of the active ingredients in the pharmaceutical compositions of the present disclosure may be varied so as to obtain an amount of the active ingredient which is effective to achieve the desired therapeutic response for a particular patient, composition, and mode of administration, without being toxic to the patient. The selected dosage level will depend upon a variety of pharmacokinetic factors including the activity of the particular compositions of the present disclosure employed, or the ester, salt or amide thereof, the route of administration, the time of administration, the rate of excretion of the particular compound being employed, the duration of the treatment, other drugs, compounds and/or materials used in combination with the particular compositions employed, the age, sex, weight, condition, general health and prior medical history of the patient being treated, and like factors known in the medical arts.

[0183] Pharmaceutical compositions comprising the engineered immunoglobulins of the present disclosure can be provided by continuous infusion, or by doses at intervals of, e.g., one day, one week, or 1-7 times per week. Doses may be provided intravenously, subcutaneously, topically, orally, nasally, rectally, intramuscular, intracerebrally, or by inhalation.

[0184] The desired dose of a therapeutic comprising the engineered immunoglobulins of the present disclosure is about the same as for an antibody or polypeptide, on a moles/kg body weight basis. The doses administered to a subject may number at least 1, 2, 3, 4, 5, 6, 7, 8, 9, 10, 11, or 12, or more.

[0185] For a therapeutic comprising the engineered immunoglobulin of the present disclosure, the dosage administered to a patient may be about 0.0001 mg/kg to about 100 mg/kg of the patient's body weight.

[0186] Where a series of doses are administered, these may, for example, be administered approximately every day, approximately every week, approximately every month. The doses may, for example, continue to be administered until disease progression, adverse event, or other time as determined by the physician.

[0187] An effective amount for a particular patient may vary depending on factors such as the condition being treated, the overall health of the patient, the method route and dose of administration and the severity of side effects (see, e.g., Maynard, et al. (1996) A Handbook of SOPs for Good Clinical Practice, Interpharm Press, Boca Raton, Fla.; Dent (2001) Good Laboratory and Good Clinical Practice, Urch Publ., London, UK).

[0188] Where necessary, the therapeutic comprising the engineered immunoglobulin of the present disclosure may be incorporated into a composition that includes a solubilizing agent and a local anesthetic such as lidocaine to ease pain at the site of the injection. In addition, pulmonary administration can also be employed, e.g., by use of an inhaler or nebulizer, and formulation with an aerosolizing agent. See, e.g., U.S. Pat. Nos. 6,019,968, 5,985,320, 5,985,309, 5,934,272, 5,874,064, 5,855,913, 5,290,540, and 4,880,078; and WO 92/19244, WO 97/32572, WO 97/44013, WO 98/31346, and WO 99/66903, each of which is incorporated herein by reference their entirety.

[0189] A therapeutic comprising an engineered immunoglobulin of the present disclosure can also be administered via one or more routes of administration using one or more of a variety of methods known in the art. As will be appreciated by the skilled artisan, the route and/or mode of administration will vary depending upon the desired results. Selected routes of administration for the antibodies include intravenous, intramuscular, intradermal, intraperitoneal, subcutaneous, spinal or other parenteral routes of administration, for example by injection or infusion. Parenteral administration can represent modes of administration other than enteral and topical administration, usually by injection, and includes, without limitation, intravenous, intramuscular, intraarterial, intrathecal, intracapsular, intraorbital, intracardiac, intradermal, intraperitoneal, transtracheal, subcutaneous, subcuticular, intraarticular, subcapsular, subarachnoid, intraspinal, epidural and intrasternal injection and infusion. Alternatively, a composition of the present disclosure can be administered via a non-parenteral route, such as a topical, epidermal or mucosal route of administration, for example, intranasally, orally, vaginally, rectally, sublingually or topically.

[0190] The therapeutic comprising an engineered immunoglobulin of the present disclosure may be administered via any of the above routes using, e.g., an injection device, an injection pen, a vial and syringe, pre-filled syringe, autoinjector, an infusion pump, a patch pump, an infusion bag and needle, etc. If the molecules or fragments thereof of the disclosure are administered in a controlled release or sustained release system, a pump may be used to achieve controlled or sustained release (see Langer, supra; Sefton, 1987, CRC Crit. Ref Biomed. Eng. 14:20; Buchwald et al., 1980, Surgery 88:507; Saudek et al., 1989, N. Engl. J. Med. 321:574). Polymeric materials can be used to achieve controlled or sustained release of the therapies of the disclosure (see e.g., Medical Applications of Controlled Release, Langer and Wise (eds.), CRC Pres., Boca Raton, Fla. (1974); Controlled Drug Bioavailability, Drug Product Design and Performance, Smolen and Ball (eds.), Wiley, New York (1984); Ranger and Peppas (1983) J. Macromol. Sci. Rev. Macromol. Chem. 23:61; see also Levy et al., (1985) Science 228:190; During et al., (1989) Ann. Neurol. 25:351; Howard et al., (1989) J. Neurosurg., 7(1):105; U.S. Pat. Nos. 5,679,377; 5,916,597; 5,912,015; 5,989,463; 5,128,326; WO 99/15154; and WO 99/20253. Examples of polymers used in sustained release formulations include, but are not limited to, poly(2-hydroxy ethyl methacrylate), poly(methyl methacrylate), poly(acrylic acid), poly(ethylene-co-vinyl acetate), poly(methacrylic acid), polyglycolides (PLG), polyanhydrides, poly(N-vinyl pyrrolidone), poly(vinyl alcohol), polyacrylamide, poly(ethylene glycol), polylactides (PLA), poly(lactide-co-glycolides) (PLGA), and polyorthoesters. In one embodiment, the polymer used in a sustained release formulation is inert, free of leachable impurities, stable on storage, sterile, and biodegradable. A controlled or sustained release system can be placed in proximity of the prophylactic or therapeutic target, thus requiring only a fraction of the systemic dose (see, e.g., Goodson, in Medical Applications of Controlled Release, supra, vol. 2, pp. 115-138 (1984)).

[0191] Controlled release systems are discussed in the review by Langer (Science (1990) 249:1527-1533). Any technique known to one of skill in the art can be used to produce sustained release formulations comprising one or more molecules or fragments thereof of the present application. See, e.g., U.S. Pat. No. 4,526,938, WO 91/05548, WO 96/20698, Ning et al., (1996) Radiotherapy & Oncology 39: 179-189; Song et al., (1995) PDA Journal of Pharm Sci & Tech., 50: 372-397; Cleek et al., (1997) Pro. Intl Symp. Control. Rel. Bioact. Mater. 24: 853-854; Lam et al., (1997) Proc. Intl Symp. Control Rel. Bioact. Mater., 24: 759-760, each of which is incorporated herein by reference in their entirety.

[0192] If a pharmaceutical composition comprising an engineered immunoglobulin of the present disclosure is administered topically, it can be formulated in the form of an ointment, cream, transdermal patch, lotion, gel, shampoo, spray, aerosol, solution, emulsion, or other forms known to one of skill in the art. See, e.g., Remington's Pharmaceutical Sciences and Introduction to Pharmaceutical Dosage Forms, 19th ed., Mack Pub. Co., Easton, Pa. (1995). For non-sprayable topical dosage forms, viscous to semi-solid or solid forms comprising a carrier or one or more excipients compatible with topical application and having a dynamic viscosity, in some instances, greater than water are typically employed. Suitable formulations include, without limitation, solutions, suspensions, emulsions, creams, ointments, powders, liniments, salves, and the like, which are, if desired, sterilized or mixed with auxiliary agents (e.g., preservatives, stabilizers, wetting agents, buffers, or salts) for influencing various properties, such as, for example, osmotic pressure. Other suitable topical dosage forms include sprayable aerosol preparations wherein the active ingredient, in some instances, in combination with a solid or liquid inert carrier, is packaged in a mixture with a pressurized volatile (e.g., a gaseous propellant, such as Freon) or in a squeeze bottle. Moisturizers or humectants can also be added to pharmaceutical compositions and dosage forms if desired. Examples of such additional ingredients are known in the art.

[0193] If a pharmaceutical composition comprising an engineered immunoglobulin of the present disclosure is administered intranasally, it can be formulated in an aerosol form, spray, mist or in the form of drops. In particular, prophylactic or therapeutic agents for use according to the present disclosure can be conveniently delivered in the form of an aerosol spray presentation from pressurized packs or a nebulizer, with the use of a suitable propellant (e.g., dichlorodifluoromethane, trichlorofluoromethane, dichlorotetrafluoroethane, carbon dioxide or other suitable gas). In the case of a pressurized aerosol the dosage unit may be determined by providing a valve to deliver a metered amount. Capsules and cartridges (composed of, e.g., gelatin) for use in an inhaler or insufflator may be formulated containing a powder mix of the compound and a suitable powder base such as lactose or starch.

[0194] A pharmaceutical composition comprising an engineered immunoglobulin of the present disclosure can also be cyclically administered to a patient.

[0195] In certain embodiments, pharmaceutical compositions comprising an engineered immunoglobulin of the present disclosure can be formulated to ensure proper distribution in vivo. For example, the blood-brain barrier (BBB) excludes many highly hydrophilic compounds. To ensure that the therapeutic compounds of the disclosure cross the BBB (if desired), they can be formulated, for example, in liposomes. For methods of manufacturing liposomes, see, e.g., U.S. Pat. Nos. 4,522,811; 5,374,548; and 5,399,331. The liposomes may comprise one or more moieties which are selectively transported into specific cells or organs, thus enhance targeted drug delivery (see, e.g., Ranade V V (1989) J. Clin. Pharmacol. 29:685). Exemplary targeting moieties include folate or biotin (see, e.g., U.S. Pat. No. 5,416,016 to Low et al); mannosides (Umezawa et al., (1988) Biochem. Biophys. Res. Commun. 153:1038); antibodies (P. G. Bloeman et al., (1995) FEBS Lett., 357: 140; M. Owais et al. (1995) Antimicrob. Agents Chemother., 39: 180); surfactant protein A receptor (Briscoe et al., (1995) Am. J. Physiol. 1233:134); p 120 (Schreier et al (1994) J. Biol. Chem. 269:9090); see also Keinanen & Laukkanen (1994) FEBS Lett., 346:123-6; Killion & Fidler (1994) Immunomethods, 4: 273.

[0196] The present application also provides protocols for the co-administration or treatment of patients using a pharmaceutical composition comprising an engineered immunoglobulin of the present disclosure in combination with other therapies or therapeutic agent(s). Methods for co-administration or treatment with an additional therapeutic agent, e.g., a cytokine, steroid, chemotherapeutic agent, antibiotic, or radiation, are known in the art (see, e.g., Hardman et al., (eds.) (2001) Goodman and Gilman's The Pharmacological Basis of Therapeutics, 10.sup.th ed., McGraw-Hill, New York, N.Y.; Poole and Peterson (eds.) (2001) Pharmacotherapeutics for Advanced Practice: A Practical Approach, Lippincott, Williams & Wilkins, Phila., Pa.; Chabner and Longo (eds.) (2001) Cancer Chemotherapy and Biotherapy, Lippincott, Williams & Wilkins, Phila., Pa.). An effective amount of therapeutic may decrease the symptoms by at least 10%, by at least 20%, at least about 30%, at least 40%, or at least 50%.

[0197] In some embodiments, a pharmaceutical composition of the disclosure further comprises one or more additional therapeutic agents.

[0198] In addition to the above therapeutic regimens, the patient may be subjected to surgery and other forms of physical therapy.

[0199] Therapeutic Application

[0200] Therapeutic or pharmaceutical compositions comprising an engineered immunoglobulin of the present disclosure, whilst not being limited to, are useful for the treatment, prevention, or amelioration of cell proliferative disorders or conditions in which there is an abnormal proliferation of cells, termed herein as “cell proliferative disorders or conditions”. In one aspect, the disclosure provides methods for treating a cell proliferative disorder or condition. In one aspect, the subject of treatment is a human.

[0201] Examples of cell proliferative disorders or conditions that may be treated, prevented, or ameliorated using therapeutic or pharmaceutical compositions comprising an engineered immunoglobulin of the present disclosure include but are not limited to fibrosis and cancer. As used herein, the term “cancer” is meant to include all types of cancerous growths or oncogenic processes, metastatic tissues or malignantly transformed cells, tissues, or organs, irrespective of histopathologic type or stage of invasiveness.

[0202] In one embodiment, the engineered immunoglobulin binds to a target antigen that is selected from the list consisting of: fibronectin EDA, HER2, EGFR, CD20, CD30, EpCAM, GD2 and solid tumor antigens.

[0203] In specific embodiments, the administration of a therapeutic or pharmaceutical composition comprising an engineered immunoglobulin of the present disclosure to a subject in accordance with the methods described herein achieves one, two, or three or more results: (1) a reduction in the growth of a tumor or neoplasm; (2) a reduction in the formation of a tumor; (3) an eradication, removal, or control of primary, regional and/or metastatic cancer; (4) a reduction in metastatic spread; (5) a reduction in mortality; (6) an increase in survival rate; (7) an increase in length of survival; (8) an increase in the number of patients in remission; (9) a decrease in hospitalization rate; (10) a decrease in hospitalization lengths; and (11) the maintenance in the size of the tumor so that it does not increase by more than about 10%, or by more than about 8%, or by more than about 6%, or by more than about 4%; preferably the size of the tumor does not increase by more than about 2%.

[0204] In a specific embodiment, the administration of a therapeutic or pharmaceutical composition comprising an engineered immunoglobulin of the present disclosure to a subject with cancer (in some embodiments, an animal model for cancer) in accordance with the methods described herein inhibits or reduces the growth of a tumor by at least about 2-fold, preferably at least about 2.5-fold, at least about-3 fold, at least about 4-fold, at least about 5-fold, at least about 7-fold, or at least about 10-fold relative to the growth of a tumor in a subject with cancer (in some embodiments, in the same animal model for cancer) administered a negative control as measured using assays well known in the art. In another embodiment, the administration of a therapeutic or pharmaceutical composition comprising an engineered immunoglobulin of the present disclosure to a subject with cancer (in some embodiments, an animal model for cancer) in accordance with the methods described herein inhibits or reduces the growth of a tumor by at least about 25%, at least about 30%, at least about 35%, at least about 40%, at least about 45%, at least about 50%, at least about 55%, at least about 60%, at least about 65%, at least about 70%, at least about 75%, at least about 80%, at least about 85%, at least about 90%, or at least about 95% relative to the growth of a tumor in a subject with cancer (in some embodiments, in the same animal model for cancer) administered a negative control, as measured using assays well known in the art.

[0205] Examples of cancerous disorders include, but are not limited to, solid tumors, hematological cancers, soft tissue tumors, and metastatic lesions.

[0206] In a specific embodiment, the cancer is breast cancer, neuroblastoma, lymphoma, colon cancers, pancreatic ductal adenocarcinoma, melanoma, renal cell carcinoma, bladder cancer, colorectal cancer, non-small cell lung cancer, non-Hodgkins lymphoma or multiple myeloma.

[0207] Combination Therapies

[0208] Administered “in combination”, in reference to an additional therapeutic agent, means that two (or more) different treatments are delivered to the subject during the course of the subject's affliction with the disorder. In some embodiments, the delivery of one treatment is still occurring when the delivery of the second begins, so that there is overlap in terms of administration. This is referred to as “simultaneous” or “concurrent delivery”. In other embodiments, the delivery of one treatment ends before the delivery of the other treatment begins. This is referred to as “sequential delivery”. In some embodiments of either case, the treatment is more effective because of combined administration. The additional therapeutic agent(s) of the combination therapies of the present disclosure can also be cyclically administered. Combination cycling therapy involves the administration of a first therapy for a period of time, followed by the administration of a second for a period of time and repeating this sequential administration.

[0209] A therapeutic or pharmaceutical composition comprising an engineered immunoglobulin as described herein can be administered together with one or more other therapies, e.g., anti-cancer agents, cytokines or anti-hormonal agents, to treat and/or manage cancer. Other therapies that can be used in combination with a therapeutic or pharmaceutical composition comprising an engineered immunoglobulin as described herein, include, but are not limited to, small molecules, synthetic drugs, peptides (including cyclic peptides), polypeptides, proteins, nucleic acids (e.g., DNA and RNA nucleotides including, but not limited to, antisense nucleotide sequences, triple helices, RNAi, and nucleotide sequences encoding biologically active proteins, polypeptides or peptides), antibodies, synthetic or natural inorganic molecules, mimetic agents, and synthetic or natural organic molecules.

[0210] Non-limiting examples of one or more other therapies that can be used in addition to a therapeutic or pharmaceutical composition comprising an engineered immunoglobulin as described herein include, but not limited to, chemotherapy, radiotherapy, cytotoxic agents, chemotherapeutic agents, cytokines, kinase inhibitors, low dose gemcitabine, 5-fluorouracil and cytokine modulators. In particular, one or more other therapies that can be used in addition to a therapeutic or pharmaceutical composition comprising an engineered immunoglobulin of the present disclosure include in particular immune oncology approaches that would perturb the tumor microenvironment, for example, recombinant IL-2, recombinant IL-15, recombinant IL-12, recombinant IL-21, anti-IL1β, anti-TGFβ, anti-CD39, anti-CD73, anti-CTLA4, anti-PD(L)1, anti-TIM3, HDAC inhibitors, HIF1a inhibitors and anti-angiogenics such as anti-VEGF.

[0211] Kits

[0212] The disclosure also encompasses kits for treating a patient having a cell proliferative disorder. Such kits comprise a therapeutically effective amount of a therapeutic or pharmaceutical composition comprising an engineered immunoglobulin as described herein. Additionally, such kits may comprise means for administering the therapeutic or pharmaceutical composition comprising an engineered immunoglobulin as described herein (e.g., an autoinjector, a syringe and vial, a prefilled syringe, a prefilled pen) and instructions for use. These kits may contain additional therapeutic agents (described infra) for treating a cell proliferative disorder. Such kits may also comprise instructions for administration of the therapeutic or pharmaceutical composition comprising an engineered immunoglobulin as described herein, to treat the patient. Such instructions can provide the dose, route of administration, regimen, and total treatment duration for use with the therapeutic or pharmaceutical composition comprising an engineered immunoglobulin as described herein.

[0213] The phrase “means for administering” is used to indicate any available implement for systemically administering a drug to a patient, including, but not limited to, a pre-filled syringe, a vial and syringe, an injection pen, an auto-injector, an IV drip and bag, an infusion pump, a patch, an infusion bag and needle, etc. With such items, a patient may self-administer the drug (i.e., administer the drug without the assistance of a physician) or a medical practitioner may administer the drug.

### EXAMPLES

[0214] The following examples are provided to further illustrate the disclosure but not to limit its scope. Other variants of the disclosure will be readily apparent to one of ordinary skill in the art and are encompassed by the appended claims.

[0215] All constructs derived from amino acid sequences generated according to Examples 1, 2 and 3, were expressed in mammalian systems and purified (Example 4) to be assessed for binding to FcαRI, FcRn, FcγRIa and FcγRIIIa using surface plasmon resonance (SPR) (Example 5). Functionality of the engineered immunoglobulins was assessed by a cell-based assay using human freshly isolated PMN, PBMC and monocytes-derived macrophages (Examples 6 and 7). Thermal stability was investigated with differential scanning calorimetry (DSC) measurement (Example 8). All Examples were performed using the engineered immunoglobulins in an antibody format comprising VH and VL domains recognizing the antigen HER2 and engineered hinge and Fc regions based on either IgA2 or IgG1. SEQ ID NO: 1 is the full length heavy chain sequence of an anti-HER2 binding antibody having a VH domain that binds HER2 and a hinge and constant domains from IgG1. SEQ ID NO: 3 is a full length heavy chain sequence of an anti-HER2 binding antibody having a VH domain that binds HER2 and a hinge and constant domains from the m2 allotype of IgA2 (Lombana et al., (2019) MABS, 11(6): 1122-38). SEQ ID NO: 124 is the light chain sequence of an anti-HER2-binding antibody having a VL domain that binds HER2 and a constant domain (CL; kappa) from IgG1.

### Example 1: IgA/IgG Protein Engineering

[0216] 1.1 Transfer of IgA Fc/hFcαRI Interface from Human IgA to Human IgG Immunoglobulin

[0217] Initial experimental work focused on the stepwise transfer of constant domains from an IgG1 isotype antibody to an IgA2 isotype antibody comprising VH and VL domains binding to HER2.

[0218] 1.1.1. Alpha Tail-Piece Removal and P_CH1.124_R (IMGT Numbering for C-Domain) for Monomeric IgA2 Generation

[0219] IgA exists in three different forms, a monomeric form in circulating in the blood, a dimeric form found in the mucosae compartment and a secretory form found in association with the secretory compartment that undergoes transcytosis. For the present work, using the monomeric form of IgA2, it was necessary to generate a monomeric form of IgA2 that was less susceptible to degradation by proteolytic enzymes. Therefore the tail piece, found at the C-terminal of the IgA2 CH3 domain, as present in SEQ ID NO: 130 (FIG. 2a), was removed by standard cloning and PCR methods, using modified sequences synthesized by Geneart (Regensburg, Del.). The resulting monomeric form of IgA2 lacked the tail piece and is shown in SEQ ID NO: 2 (FIG. 2b). Furthermore, the presence of the amino acid residue proline at position 124 (IMGT numbering for C-domain) in the CH1 domain and directly preceding the hinge region, impacts how the IgA2 light chain pairs with its heavy chain (Lombana et al., (2019) MABS, 11(1): 75-93). A substitution of proline at position 124 with arginine (P124R) reduced considerably the heterogeneity of IgA2 (i.e. light chain-heavy chain mispairing) without affecting the ability of IgA2 to interact with hFcαRI (Table 2), as determined by SDS-PAGE analysis (results not shown). This modification was made in IgA2 sequences with the tail piece, as shown in SEQ ID NO: 131, and in IgA2 sequences without the tail piece, as shown in SEQ ID NO: 3.

TABLE 2
Affinity and maximum response of
engineered immunoglobulin towards hFcαRI
determined by surface plasmon resonance,
following the procedure described in Example 5a.

| SEQ ID | Ref | | Maximum response at |
|---|---|---|---|
| NO | number | KD (1:1) (M) | 1000 nM hFcαRI (RU) |
| 2 | 2258 | 2.59E−07 | 263 |
| 3 | 2737 | 2.38E−07 | 182 |

[0220] 1.1.2. IgG1/IgA2 CH1 Replacement (IMGT Numbering for C-Domain)

[0221] The CH1 domain of an anti-HER2 antibody comprising IgA2 constant domains was replaced by the corresponding CH1 domain of IgG1 (FIG. 2c). When the engineered antibody was tested for hFcαRI binding, the substitution of the CH1 domain, as shown in SEQ ID NO: 4 was found to have limited impact on hFcαRI binding, as determined using surface plasmon resonance (Table 3).

TABLE 3
Affinity and maximum response of
engineered immunoglobulin towards hFcαRI
determined by surface plasmon resonance,
following the procedure described in Example 5a.

| | | | Maximum response |
|---|---|---|---|
| SEQ ID | Ref | | at 1000 nM hFcαRI |
| NO | number | KD (1:1) (M) | (RU) |
| 2 | 2258 | 2.59E−07 | 263 |
| 4 | 2259 | 4.17E−07 | 294 |
| 5 | 2260 | 4.91E−07 | 210 |
| 6 | 2261 | 4.73E−07 | 270 |

[0222] 1.1.3. IgG1/IgA2 Hinge Replacement (IMGT Numbering for C-Domain)

[0223] The CH1 and hinge domains of the heavy chain of an IgA2 anti-HER2 antibody were replaced with the corresponding CH1 and hinge domains from IgG1 (FIG. 2d). When the engineered antibody was tested for hFcαRI binding, the substitution of the CH1 and hinge domains as shown in SEQ ID NOs: 7, 8 and 9) was found to have little impact on hFcαRI binding, as determined using surface plasmon resonance (Table 4).

TABLE 4
Affinity and maximum response of
engineered immunoglobulin towards hFcαRI
determined by SPR experiment, following
procedure described in Example 5a.

| | | | Maximum response |
|---|---|---|---|
| SEQ ID | Ref | | at 1000 nM hFcαRI |
| NO | number | KD (1:1) (M) | (RU) |
| 2 | 2258 | 2.59E−07 | 263 |
| 7 | 2262 | 3.23E−07 | 290 |
| 8 | 2263 | 6.42E−07 | 202 |
| 9 | 2264 | 3.49E−07 | 300 |

[0224] 1.1.4. IgA2 Fc/hFcαRI Complex In-Silico Analysis (Yasara and PyMol)

[0225] In-silico analysis was performed on a complex of IgA1 Fc with hFcαRI using the crystal structure PDB 1D 1OWO. The computer program YASARA for molecular visualizing (www.yasara.org) and the open source molecular visualization system PyMOL (https://pymol.org) were used to display and work on the 3D complex structure. All solvent exposed residues and residues located in proximity to hFcαRI (distance d<7 Angstrom) were considered to be potentially involved in the interaction of IgA1 Fc with hFcαRI.

[0226] 1.1.5. Superimposition IgG1/IgA1 Fcs (PyMOL)

[0227] In-silico superimposition of IgG1 and IgA1 Fcs was performed using the IgA1 Fc/hFcαRI crystal structure (PDB ID 1OWO) and the IgG1 Fc crystal structure PDB 1FC1. Based on this superimposition and “necklace” representation (IMGT resources), IgG1 residues structurally equivalent to IgA1 residues involved in IgA1 Fc/hFcαRI interactions were identified.

[0228] 1.1.6. IgA/hFcαRI Interaction Site and Secondary Structure Elements Extraction (IMGT Numbering for C-Domain)

[0229] Previously identified IgG1 residues (see section 1.1.4) were replaced by corresponding residues from IgA2. Also, residues responsible for secondary structures (alpha helixes, beta strands and turns holding or related to residues described in 1.1.4 above) were transferred from IgA2 into IgG1 since they were observed from the crystal structure to be holding and orientating residues that interact directly with hFcαRI.

[0230] 1.1.7. IgG/IgA CH2, CH3 and CH2/CH3 Elbow Length Adjustment (IMGT Numbering for C-Domain)

[0231] Although IgG1 and IgA2 share the same structural homology, the amino acid sequence length and angles between CH2 and CH3 holding residues interacting with hFcαRI are different. For this reason, the length of IgG1 CH2 and CH3 domains was adjusted in a region at the CH2/CH3 interface, termed herein as the “CH2/CH3 elbow” (FIG. 2e). This region, comprising approximately the last three residues of the CH2 domain and the first six residues of the CH3 domain of IgA2 (shown schematically in FIG. 8), was shortened, based on the structural IgG1/IgA1 comparison and “necklace” display (IMGT resources) as shown in SEQ ID NOs: 4, 5, 6, 7, 8 and 9. Influence of the length of this elbow on binding to hFcαRI is shown in Table 5.

TABLE 5
Affinity and maximum response of
engineered immunoglobulin towards hFcαRI
determined by SPR experiment, following
procedure described in Example 5a.

| | | | Maximum response |
|---|---|---|---|
| SEQ ID | Ref | | at 1000 nM hFcαRI |
| NO | number | KD (1:1) (M) | (RU) |
| 2 | 2258 | 2.59E−07 | 263 |
| 4 | 2259 | 4.17E−07 | 294 |
| 5 | 2260 | 4.91E−07 | 210 |
| 6 | 2261 | 4.73E−07 | 270 |
| 7 | 2262 | 3.23E−07 | 290 |
| 8 | 2263 | 6.42E−07 | 202 |
| 9 | 2264 | 3.49E−07 | 300 |

[0232] 1.1.8. IgG/IgA CH2/CH2 Modifications Based on Rational Design

[0233] In the engineered anti-HER2 antibody already comprising a CH1 domain and hinge region from IgG1, the CH2 domain was then replaced with a CH2 domain from IgG1 (FIG. 2f). Using rational design, various amino acid modifications were made at positions in the CH2 domain based on the superimposition work as described in section 1.1.5 above to substitute the IgG1 residue with the corresponding residue from IgA2 (as shown in SEQ ID NOs: 10 to 12, 14 to 23). These CH2 mutations are summarized in Table 6 below compared to wild-type IgG1 (SEQ ID NO: 1) and their impact on binding on hFcαRI is presented in Table 7.

TABLE 6
Summary of CH2 mutations (based on sequence SEQ ID NO: 1)

| SEQ | |
|---|---|
| ID NO | CH2 Mutation set (IMGT numbering for C-domain) |
| 10 | P8R, K10A, P11L, L12E, T14L, M15.1L, S16G, R17S, T18E, T90P, V91G, L92C, H93A, |
| | D95P, L97N, N98H, S122T, A124S, K125# |
| 11 | P8R, K10A, P11L, L12E, T14L, M15.1L, S16G, R17S, T18E, P19A, E20N, T90P, V91G, |
| | L92C, H93A, D95P, L97N, N98H, S122T, A124S, K125# |
| 12 | P8R, K10A, P11L, L12E, T14L, M15.1L, S16G, R17S, T18E, P19A, E20N, T90P, V91G, |
| | H93A, D95P, L97N, N98H, S122T, A124S, K125# |
| 14 | P8R, K10A, P11L, L12E, T14L, M15.1L, S16G, R17S, T18E, P19A, E20N, N84.4A, T90P, |
| | V91G, H93A, D95P, L97N, K125# |
| 15 | P8R, K10A, P11L, L12E, T14L, M15.1L, S16G, R17S, T18E, P19A, E20N, D34#, H45.5#, |
| | N77#, S85.4G, T90P, V91G, H93A, D95P, L97N, N98H, K125# |
| 16 | A1.6#, P1.5#, E1.4#, L1.3#, L1.2#, G1.1#, P8R, K10A, P11L, L12E, T14L, M15.1L, S16G, |
| | R17S, T18E, P19A, E20N, D34#, H45.5#, N77#, T90P, V91G, H93A, D95P, L97N, N98H, |
| | K125# |
| 17 | L1.2C, G1.1C, P8R, K10A, P11L, L12E, T14L, M15.1L, S16G, R17S, T18E, P19A, E20N, |
| | D34#, H45.5#, N77#, N84.4C, S85.4G, T85.3C, T90P, V91G, H93A, D95P, L97N, N98H, |
| | K125# |
| 18 | A1.6#, P1.5#, E1.4#, L1.3#, L1.2C, G1.1C, P8R, K10A, P11L, L12E, T14L, M15.1L, S16G, |
| | R17S, T18E, P19A, E20N, D34#, H45.5#, N77#, N84.4C, S85.4G, T85.3C, T90P, V91G, |
| | H93A, D95P, L97N, N98H, K125# |
| 19 | P8R, K10A, P11L, L12E, T14L, M15.1L, S16G, R17S, T18E, P19A, E20N, N84.4A, T90P, |
| | V91G, L92C, H93A, D95P, L97N, N98H, K125# |
| 20 | P8R, K10A, P11L, L12E, T14L, M15.1L, S16G, R17S, T18E, P19A, E20N, D34#, H45.5#, |
| | N77#, S85.4G, T90P, V91G, L92C, H93A, D95P, L97N, N98H, K125# |
| 21 | A1.6#, P1.5#, E1.4#, L1.3#, L1.2#, G1.1#, P8R, K10A, P11L, L12E, T14L, M15.1L, S16G, |
| | R17S, T18E, P19A, E20N, D34#, H45.5#, N77#, S85.4G, T90P, V91G, L92C, H93A, D95P, |
| | L97N, N98H, K125# |
| 22 | L1.2C, G1.1C, P8R, K10A, P11L, L12E, T14L, M15.1L, S16G, R17S, T18E, P19A, E20N, |
| | D34#, H45.5#, N77#, N84.4C, S85.4G, T85.3C, T90P, V91G, L92C, H93A, D95P, L97N, |
| | N98H, K125# |
| 23 | A1.6#, P1.5#, E1.4#, L1.3#, L1.2C, G1.1C, P8R, K10A, P11L, L12E, T14L, M15.1L, S16G, |
| | R17S, T18E, P19A, E20N, D34#, H45.5#, N77#, N84.4C, S85.4G, T85.3C, T90P, V91G, |
| | L92C, H93A, D95P, L97N, N98H, K125# |

TABLE 7
Affinity and maximum response of engineered
immunoglobulin towards hFcαRI
determined by surface plasmon resonance,
following the procedure described in Example 5a.

| SEQ ID | Ref | | Maximum response at |
|---|---|---|---|
| NO | number | KD (1:1) (M) | 1000 nM hFcαRI (RU) |
| 2 | 2258 | 2.59E−07 | 263 |
| 10 | 2265 | 0.00E+00 | 0 |
| 11 | 2266 | 0.00E+00 | 0 |
| 12 | 2267 | 0.00E+00 | 10 |
| 14 | 2343 | 0.00E+00 | 0 |
| 15 | 2344 | 0.00E+00 | 0 |
| 16 | 2345 | 0.00E+00 | 0 |
| 17 | 2346 | 0.00E+00 | 0 |
| 18 | 2347 | 0.00E+00 | 0 |
| 19 | 2348 | 0.00E+00 | 0 |
| 20 | 2349 | 0.00E+00 | 0 |
| 21 | 2350 | 0.00E+00 | 0 |
| 22 | 2351 | 0.00E+00 | 0 |
| 23 | 2352 | 0.00E+00 | 0 |

[0234] 1.1.9 IgG/IgA CH3/CH3 Core Interface Replacement Using Rational Design

[0235] The above described CH2 modifications were not sufficient to restore hFcαRI binding to the engineered antibody. Therefore to investigate whether modifications to the CH3 domain could contribute to hFcαRI binding, an engineered anti-HER2 antibody was generated comprising a CH1 domain and a CH3 domain from IgG1 but retaining the hinge and CH2 domain from IgA2, and with a CH2/CH3 elbow region from IgG1. In addition, further modifications were introduced to CH3 domain to replace IgG1 residues with IgA2 residues interacting with hFcαRI held by the beta-sheet. From structural analysis, it is known that one side of the beta sheet turns the side chain of the IgA2 CH3 domain amino acid residues towards hFcαRI, whereas the other side of the beta sheet turns the side chains of the IgA2 CH3 residues towards the CH3/CH3 core interface. The CH3/CH3 core residues can affect the positioning of the residue side chains in their interactions with hFcαRI depending of their properties and steric hindrance. For this reason, IgG1 CH3 core residues at the CH3/CH3 interface were exchanged with IgA2 residues in order to correctly orientate interacting residues with hFcαRI, located on the other side of the beta-sheet (FIG. 2g; as shown in SEQ ID NOs: 13, 24 to 27, 46 to 48 and 87 to 94). These CH2 mutations are summarized in Table 8 below and their effect on hFcαRI binding is presented in Table 9.

TABLE 8
Summary of CH3 mutations (based on sequence SEQ ID NO: 1)

| SEQ | |
|---|---|
| ID NO | CH3 Mutation set (IMGT numbering for C-domain) |
| 87 | R1.1F, T6L, S10P, R11S, D12E, T15A, \hat{ }15L, K16N, N17E, Q18L, V25A, Y29S, S35K, |
| | I37V, A38L, E40R, E42L, S43Q, N44G, G45S, P45.2E, E45.3L, N45.4P, \hat{ }45.4R,E, P82A, |
| | P83S, L84.1Q, D84.2E, S84.3P, D84.4S, \hat{ }84.4Q,G,T, G85.4T, L85V, D92A, K93A, S94E, |
| | R95D, Q97K, Q98K, N100D, V101T, S105M, M107G, H113P, N114L, H115A, Y116F, |
| | L121I, L123R |
| 88 | R1.1F, T6L, V25A, Y29S, S35K, I37V, A38L, E40R, E42L, S43Q, N44G, G45S, P45.2E, |
| | E45.3L, N45.4P, \hat{ }45.4R,E, P82A, P83S, L84.1Q, D84.2E, S84.3P, D84.4S, \hat{ }84.4Q,G,T, |
| | G85.4T, L85V, D92A, K93A, S94E, R95D, Q97K, Q98K, N100D, V101T, S105M, M107G, |
| | H113P, N114L, H115A, Y116F, L121I, L123R |
| 89 | T6L, V25A, S35K, I37V, A38L, E40R, E42L, S43Q, N44G, G45S, P45.2E, E45.3L, N45.4P, |
| | \hat{ }45.4R,E, P82A, P83S, L85V, D92A, K93A, S94E, R95D, Q97K, Q98K, N100D, V101T, |
| | S105M, M107G, H113P, N114L, H115A, Y116F, L121I, L123R |
| 90 | T6L, S10P, R11S, D12E, T15A, \hat{ }15L, K16N, N17E, Q18L, V25A, S35K, I37V, A38L, E40R, |
| | E42L, S43Q, N44G, G45S, P45.2E, E45.3L, N45.4P, \hat{ }45.4R,E, P82A, P83S, L85V, D92A, |
| | K93A, S94E, R95D, Q97K, Q98K, N100D, V101T, S105M, M107G, H113P, N114L, H115A, |
| | Y116F, L121I, L123R |
| 91 | T6L, S10P, R11S, D12E, T15A, \hat{ }15L, K16N, N17E, Q18L, V25A, S35K, I37V, A38L, E40R, |
| | E42L, S43Q, N44G, G45S, P45.2E, E45.3L, N45.4P, \hat{ }45.4R,E, P82A, P83S, L85V, |
| | S105M, M107G, H113P, N114L, H115A, Y116F, L121I |
| 92 | R1.1F, T6L, S10P, R11S, D12E, T15A, \hat{ }15L, K16N, N17E, Q18L, V25A, Y29S, S35K, |
| | I37V, A38L, E40R, E42L, S43Q, N44G, G45S, P45.2E, E45.3L, N45.4P, \hat{ }45.4R,E, P82A, |
| | P83S, L84.1Q, D84.2E, S84.3P, D84.4S, \hat{ }84.4Q,G,T, G85.4T, L85V, S105M, M107G, |
| | H113P, N114L, H115A, Y116F, L121I |
| 93 | R1.1F, T6L, V25A, Y29S, S35K, I37V, A38L, E40R, E42L, S43Q, N44G, G45S, P45.2E, |
| | E45.3L, N45.4P, \hat{ }45.4R,E, P82A, P83S, L84.1Q, D84.2E, S84.3P, D84.4S, \hat{ }84.4Q,G,T, |
| | G85.4T, L85V, S105M, M107G, H113P, N114L, H115A, Y116F, L121I |
| 94 | T6L, V25A, S35K, I37V, A38L, E40R, E42L, S43Q, N44G, G45S, P45.2E, E45.3L, N45.4P, |
| | \hat{ }45.4R,E, P82A, P83S, L85V, S105M, M107G, H113P, N114L, H115A, Y116F, L121I |
| 13 | Q1.3N, P1.2T, R1.1F, E1R, A38L, E40R, E42L, S43Q, N44G, G45S, P45.2E, E45.3L, |
| | V101T, S105M, M107G, H113P, N114L, H115A, Y116F, S120T |
| 24 | A38L, E40R, E42L, S43Q, N44G, G45S, P45.2E, E45.3L, V101T, S105M, M107G, H113P, |
| | N114L, H115A, Y116F, S120T |
| 25 | A38L, E40R, E42L, S43Q, N44G, G45S, P45.2E, E45.3L, N45.4P, \hat{ }45.4R,E, V101T, |
| | S105M, M107G, H113P, N114L, H115A, Y116F, S120T |
| 26 | A38L, E40R, E42L, S43Q, N44G, G45S, P45.2E, E45.3L, N45.4P, \hat{ }45.4R,E, \hat{ }84.4Q,G,T, |
| | V101T, S105M, M107G, H113P, N114L, H115A, Y116F, S120T |
| 27 | \hat{ }15L, A38L, E40R, E42L, S43Q, N44G, G45S, P45.2E, E45.3L, N45.4P, \hat{ }45.4R,E, |
| | \hat{ }84.4Q,G,T, V101T, S105M, M107G, H113P, N114L, H115A, Y116F, S120T |
| 46 | E1R, \hat{ }15L, A38L, E40R, E42L, S43Q, N44G, G45S, P45.2E, E45.3L, N45.4P, \hat{ }45.4R,E, |
| | \hat{ }84.4Q,G,T, V101T, S105M, M107G, H113P, N114L, H115A, Y116F, S120T |
| 47 | Q3E, \hat{ }15L, A38L, E40R, E42L, S43Q, N44G, G45S, P45.2E, E45.3L, N45.4P, \hat{ }45.4R,E, |
| | \hat{ }84.4Q,G,T, V101T, S105M, M107G, H113P, N114L, H115A, Y116F, S120T |
| 48 | E1R, Q3E, \hat{ }15L, A38L, E40R, E42L, S43Q, N44G, G45S, P45.2E, E45.3L, N45.4P, |
| | \hat{ }45.4R,E, \hat{ }84.4Q,G,T, V101T, S105M, M107G, H113P, N114L, H115A, Y116F, S120T |

TABLE 9
Affinity and maximum response of engineered
immunoglobulin towards hFcαRI
determined by surface plasmon resonance,
following the procedure described in Example 5a.

| | | | Maximum response |
|---|---|---|---|
| SEQ ID | Ref | | at 1000nM hFcαRI |
| NO | number | KD (1:1) (M) | (RU) |
| 2 | 2258 | 2.59E−07 | 263 |
| 13 | 2268 | 7.33E−06 | 67 |
| 24 | 2353 | 4.43E−06 | 46 |
| 25 | 2354 | 2.73E−06 | 92 |
| 26 | 2355 | 3.05E−06 | 120 |
| 27 | 2356 | 2.23E−06 | 104 |
| 46 | 2459 | 5.64E−06 | 54 |
| 47 | 2460 | 2.47E−06 | 70 |
| 48 | 2461 | 3.10E−06 | 89 |
| 87 | 2703 | 5.89E−07 | 103 |
| 88 | 2704 | 5.50E−07 | 225 |
| 89 | 2705 | 6.60E−07 | 271 |
| 90 | 2706 | 6.08E−07 | 288 |
| 91 | 2707 | 8.44E−07 | 200 |
| 92 | 2708 | 8.43E−07 | 200 |
| 93 | 2709 | 1.14E−06 | 171 |
| 94 | 2710 | 1.04E−06 | 213 |

[0236] 1.2 Semi-Rational Design—from IgA2 to IgG1

[0237] Pure rational design as described in Section 1.1 above offered the possibility to identify residues involved in the IgA2/hFcαRI interaction for subsequent transfer of these residues into an IgG1 Fc. The transfer of interacting residues and structural elements, length adjustment and engineering of CH3/CH3 core residues was successful for hinge, CH2/CH3 elbow and CH3 engineering. However, for fine tuning of the CH2 and CH3 engineering, it was necessary to complete the campaign using a semi-rational approach.

[0238] 1.2.1. ABCDEFG Beta-Strands Scan

[0239] As previously discussed, IgG1 and IgA2 share a high degree of structural homology and the CH2 and CH3 domains are both comprised of beta-sheets made from anti-parallel β-strands A, B, C, D, E, F and G (IMGT nomenclature). Each of the IgA2 CH2 and CH3 β-strands were individually scanned by sequential substitution with equivalent IgG1 β-strands. Furthermore, β-strands were replaced depending on their role in the IgA2/hFcαRI interaction, since some strands are known to hold hey residues that interact directly with hFcαRI. The replacements were: A+B, E+F, C+D, C+D+G, A+B+E+F, C+D+E+F+G, A+B+C+D+G, with up to five IgA2 beta strands replaced by IgG1 beta strands. The amino acid sequences depicted in SEQ ID NOs: 28 to 41 exemplify the modifications made to the IgA2 CH2 domain by substituting with residues from the IgG1 CH2 domain (FIG. 3a). The amino acid sequences depicted in SEQ ID NOs: 58 to 68 exemplify the modifications made to the IgA2 CH3 domain by substituting with residues from the IgG1 CH3 domain (FIG. 3b). These CH2 and CH3 mutations are summarized in Table 10 and 12 below and their effect on hFcαRI binding is presented in Table 11 and 13.

TABLE 10
Summary of CH2 mutations (based on sequence SEQ ID NO: 1)

| SEQ | |
|---|---|
| ID NO | CH2 Mutation set (IMGT numbering for C-domain) |
| 28 | P8R, K10A, P11L, K12E, T14L, M15.1L, I15.2#, S16G, R17S, T18E, P19A, E20N, V21L, |
| | V24T, V25L, V26T, D27G, V28L, S29R, H30D, E31A, D34#, P35S, E36G, V37A, K38T, |
| | N40T, Y42T, V43P, D44S, G45S, V45.1G, E45.2K, V45.3S, H45.4#, N77#, K79V, T80Q, |
| | K81G, R83P, E84.1R, Q84.2D, Y84.3L, N84.4C, S85.4G, T85.3C, R85.1S, V86S, T90P, |
| | V91G, L92C, H93A, D95P, L97N, N98H, K100E, E101T, Y102F, K103T, K105T, V106A, |
| | S107A, N108H, K109P, A110E, P114K, A115T, P116P, I117L, E118T, K119A, T120N, |
| | S122T, A124S, K125# |
| 29 | A1.6#, P1.5#, E1.4#, L1.3#, L1.2C, G1.1C, G1H, S3R, V4L, F5S, F7H, P8R, K10A, P11L, |
| | K12E, T14L, M15.1L, I15.2#, S16G, R17S, T18E, P19A, E20N, E31A, D34#, P35S, E36G, |
| | V37A, K38T, N40T, Y42T, V43P, D44S, G45S, V45.1G, E45.2K, V45.3S, H45.4#, N77#, |
| | K79V, T80Q, K81G, R83P, E84.1R, Q84.2D, Y84.3L, N84.4C, S85.4G, T85.3C, R85.1S, |
| | V86S, T90P, V91G, L92C, H93A, D95P, L97N, N98H, K100E, E101T, Y102F, K103T, |
| | K105T, V106A, S107A, N108H, K109P, A110E, P114K, A115T, P116P, I117L, E118T, |
| | K119A, T120N, S122T, A124S, K125# |
| 30 | A1.6#, P1.5#, E1.4#, L1.3#, L1.2C, G1.1C, G1H, S3R, V4L, F5S, F7H, P8R, K10A, P11L, |
| | K12E, T14L, M15.1L, I15.2#, S16G, R17S, T18E, P19A, E20N, V21L, V24T, V25L, V26T, |
| | D27G, V28L, S29R, H30D, V45.1G, E45.2K, V45.3S, H45.4#, N77#, K79V, T80Q, K81G, |
| | R83P, E84.1R, Q84.2D, Y84.3L, N84.4C, S85.4G, T85.3C, R85.1S, V86S, T90P, V91G, |
| | L92C, H93A, D95P, L97N, N98H, K100E, E101T, Y102F, K103T, K105T, V106A, S107A, |
| | N108H, K109P, A110E, P114K, A115T, P116P, I117L, E118T, K119A, T120N, S122T, |
| | A124S, K125# |
| 31 | A1.6#, P1.5#, E1.4#, L1.3#, L1.2C, G1.1C, G1H, S3R, V4L, F5S, F7H, P8R, K10A, P11L, |
| | K12E, T14L, M15.1L, I15.2#, S16G, R17S, T18E, P19A, E20N, V21L, V24T, V25L, V26T, |
| | D27G, V28L, S29R, H30D, E31A, D34#, P35S, E36G, V37A, K38T, N40T, Y42T, V43P, |
| | D44S, G45S, H45.4#, N77#, N84.4C, S85.4G, T85.3C, R85.1S, V86S, T90P, V91G, L92C, |
| | H93A, D95P, L97N, N98H, K100E, E101T, Y102F, K103T, K105T, V106A, S107A, N108H, |
| | K109P, A110E, P114K, A115T, P116P, I117L, E118T, K119A, T120N, S122T, A124S, |
| | K125# |
| 32 | A1.6#, P1.5#, E1.4#, L1.3#, L1.2#, G1.1#, G1H, S3R, V4L, F5S, F7H, P8R, K10A, P11L, |
| | K12E, T14L, M15.1L, I15.2#, S16G, R17S, T18E, P19A, E20N, V21L, V24T, V25L, V26T, |
| | D27G, V28L, S29R, H30D, E31A, D34#, P35S, E36G, V37A, K38T, N40T, Y42T, V43P, |
| | D44S, G45S, V45.1G, E45.2K, V45.3S, H45.4#, N77#, K79V, T80Q, K81G, R83P, E84.1R, |
| | Q84.2D, Y84.3L, T90P, V91G, L92C, H93A, D95P, L97N, N98H, K100E, E101T, Y102F, |
| | K103T, K105T, V106A, S107A, N108H, K109P, A110E, P114K, A115T, P116P, I117L, |
| | E118T, K119A, T120N, S122T, A124S, K125# |
| 33 | A1.6#, P1.5#, E1.4#, L1.3#, L1.2C, G1.1C, G1H, S3R, V4L, F5S, F7H, P8R, K10A, P11L, |
| | K12E, T14L, M15.1L, I15.2#, S16G, R17S, T18E, P19A, E20N, V21L, V24T, V25L, V26T, |
| | D27G, V28L, S29R, H30D, E31A, D34#, P35S, E36G, V37A, K38T, N40T, Y42T, V43P, |
| | D44S, G45S, V45.1G, E45.2K, V45.3S, H45.4#, N77#, K79V, T80Q, K81G, R83P, E84.1R, |
| | Q84.2D, Y84.3L, N84.4C, S85.4G, T85.3C, R85.1S, V86S, T90P, V91G, L92C, H93A, |
| | D95P, L97N, N98H, P114K, A115T, P116P, I117L, E118T, K119A, T120N, S122T, A124S, |
| | K125# |
| 34 | A1.6#, P1.5#, E1.4#, L1.3#, L1.2C, G1.1C, G1H, S3R, V4L, F5S, F7H, P8R, K10A, P11L, |
| | K12E, T14L, M15.1L, I15.2#, S16G, R17S, T18E, P19A, E20N, V21L, V24T, V25L, V26T, |
| | D27G, V28L, S29R, H30D, E31A, D34#, P35S, E36G, V37A, K38T, N40T, Y42T, V43P, |
| | D44S, G45S, V45.1G, E45.2K, V45.3S, H45.4#, N77#, K79V, T80Q, K81G, R83P, E84.1R, |
| | Q84.2D, Y84.3L, N84.4C, S85.4G, T85.3C, R85.1S, V86S, T90P, V91G, L92C, H93A, |
| | D95P, L97N, N98H, K100E, E101T, Y102F, K103T, K105T, V106A, S107A, N108H, |
| | K109P, A110E, S122T, A124S, K125# |
| 35 | A1.6#, P1.5#, E1.4#, L1.3#, L1.2C, G1.1C, G1H, S3R, V4L, F5S, F7H, P8R, K10A, P11L, |
| | K12E, T14L, M15.1L, I15.2#, S16G, R17S, T18E, P19A, E20N, V21L, V24T, V25L, V26T, |
| | D27G, V28L, S29R, H30D, N84.4C, S85.4G, T85.3C, R85.1S, V86S, T90P, V91G, L92C, |
| | H93A, D95P, L97N, N98H, K100E, E101T, Y102F, K103T, K105T, V106A, S107A, N108H, |
| | K109P, A110E, P114K, A115T, P116P, I117L, E118T, K119A, T120N, S122T, A124S, |
| | K125# |
| 36 | A1.6#, P1.5#, E1.4#, L1.3#, L1.2C, G1.1C, G1H, S3R, V4L, F5S, F7H, P8R, K10A, P11L, |
| | K12E, T14L, M15.1L, I15.2#, S16G, R17S, T18E, P19A, E20N, V21L, V24T, V25L, V26T, |
| | D27G, V28L, S29R, H30D, N84.4C, S85.4G, T85.3C, R85.1S, V86S, T90P, V91G, L92C, |
| | H93A, D95P, L97N, N98H, K100E, E101T, Y102F, K103T, K105T, V106A, S107A, N108H, |
| | K109P, A11OE, S122T, A124S, K125# |
| 37 | A1.6#, P1.5#, E1.4#, L1.3#, L1.2#, G1.1#, G1H, S3R, V4L, F5S, F7H, P8R, K10A, P11L, |
| | K12E, T14L, M15.1L, I15.2 delete, S16G, R17S, T18E, P19A, E20N, V21L, V24T, V25L, |
| | V26T, D27G, V28L, S29R, H30D, T90P, V91G, L92C, H93A, D95P, L97N, N98H, S122T, |
| | A124S, K125# |
| 38 | P8R, K10A, P11L, K12E, T14L, M15.1L, I15.2#, S16G, R17S, T18E, P19A, E20N, N84.4C, |
| | S85.4G, T85.3C, R85.1S, V86S, T90P, V91G, L92C, H93A, D95P, L97N, N98H, K100E, |
| | E101T, Y102F, K103T, K105T, V106A, S107A, N108H, K109P, A110E, S122T, A124S, |
| | K125# |
| 39 | P8R, K10A, P11L, K12E, T14L, M15.1L, I15.2#, S16G, R17S, T18E, P19A, E20N, E31A, |
| | D34#, P35S, E36G, V37A, K38T, N40T, Y42T, V43P, D44S, G45S, V45.1G, E45.2K, |
| | V45.3S, H45.4#, N77#, K79V, T80Q, K81G, R83P, E84.1R, Q84.2D, Y84.3L, T90P, V91G, |
| | L92C, H93A, D95P, L97N, N98H, P114K, A115T, P116P, I117L, E118T, K119A, T120N, |
| | S122T, A124S, K125# |
| 40 | P8R, K10A, P11L, K12E, T14L, M15.1L, I15.2#, S16G, R17S, T18E, P19A, E20N, E31A, |
| | D34#, P35S, E36G, V37A, K38T, N40T, Y42T, V43P, D44S, G45S, V45.1G, E45.2K, |
| | V45.3S, H45.4#, N77#, K79V, T80Q, K81G, R83P, E84.1R, Q84.2D, Y84.3L, N84.4C, |
| | S85.4G, T85.3C, R85.1S, V86S, T90P, V91G, L92C, H93A, D95P, L97N, N98H, K100E, |
| | E101T, Y102F, K103T, K105T, V106A, S107A, N108H, K109P, A110E, P114K, A115T, |
| | P116P, I117L, E118T, K119A, T120N, S122T, A124S, K125# |
| 41 | A1.6#, P1.5#, E1.4#, L1.3#, L1.2#, G1.1#, G1H, S3R, V4L, F5S, F7H, P8R, K10A, P11L, |
| | K12E, T14L, M15.1L, I15.2#, S16G, R17S, T18E, P19A, E20N, V21L, V24T, V25L, V26T, |
| | D27G, V28L, S29R, H30D, E31A, D34#, P35S, E36G, V37A, K38T, N40T, Y42T, V43P, |
| | D44S, G45S, V45.1G, E45.2K, V45.3S, H45.4#, N77#, K79V, T80Q, K81G, R83P, E84.1R, |
| | Q84.2D, Y84.3L, T90P, V91G, L92C, H93A, D95P, L97N, N98H, P114K, A115T, P116P, |
| | I117L, E118T, K119A, T120N, S122T, A124S, K125# |

TABLE 11
Affinity and maximum response of engineered
immunoglobulin towards hFcαRI
determined by surface plasmon resonance, following
the procedure described in Example 5a.

| | | | Maximum response |
|---|---|---|---|
| SEQ ID | Ref | | at 1000 nM hFcαRI |
| NO | number | KD (1:1) (M) | (RU) |
| 2 | 2258 | 2.59E−07 | 263 |
| 28 | 2462 | 4.41E−07 | 114 |
| 29 | 2463 | 0.00E+00 | 10 |
| 30 | 2464 | 3.71E−07 | 250 |
| 31 | 2465 | 3.36E−07 | 156 |
| 32 | 2466 | 3.17E−07 | 25 |
| 33 | 2467 | 0.00E+00 | 0 |
| 34 | 2468 | 3.64E−07 | 300 |
| 35 | 2469 | 3.65E−07 | 229 |
| 36 | 2470 | 3.15E−07 | 267 |
| 37 | 2471 | 0.00E+00 | 0 |
| 38 | 2472 | 0.00E+00 | 0 |
| 39 | 2473 | 0.00E+00 | 0 |
| 40 | 2474 | 3.57E−07 | 24 |
| 41 | 2475 | 0.00E+00 | 0 |

TABLE 12
Summary of CH3 mutations (based on sequence SEQ ID NO: 1)

| SEQ | |
|---|---|
| ID NO | CH3 Mutation set (IMGT numbering for C-domain) |
| 58 | \hat{ }15L, K16N, N17E, O18L, S20T, V25A, K26R, Y29S, S31K, I37V, A38L, E40R, E42L, |
| | S43Q, N44G, G45S, P45.2E, E45.3L, N45.4P, \hat{ }45.4RE, N77K, K79L, P82A, P83S, V84R, |
| | L84.1Q, D84.2E, S84.3P, D84.4S, \hat{ }84.4QGT, G85.4T, S85.3T, F85.1A, L85V, Y86T, K88I, |
| | T90R, D92A, K93A, S94E, R95D, Q97K, Q98K, N100D, V101T, S105M, M107G, H113P, |
| | N114L, H115A, Y116F, S120T, L121I, S122D, L123R, S124L, P125A |
| 59 | Q3E, Y5H, T6L, S10P, R11S, D12E, T15A, S31K, I37V, A38L, E40R, E42L, S43Q, N44G, |
| | G45S, P45.2E, E45.3L, N45.4P, \hat{ }45.4RE, N77K, K79L, P82A, P83S, V84R, L84.1Q, |
| | D84.2E, S84.3P, D84.4S, \hat{ }84.4QGT, G85.4T, S85.3T, F85.1A, L85V, Y86T, K88I, T90R, |
| | D92A, K93A, S94E, R95D, Q97K, Q98K, N100D, V101T, S105M, M107G, H113P, N114L, |
| | H115A, Y116F, S120T, L121I, S122D, L123R, S124L, P125A |
| 60 | Q3E, Y5H, T6L, S10P, R11S, D12E, T15A, \hat{ }15L, K16N, N17E, O18L, S20T, V25A, K26R, |
| | Y29S, N77K, K79L, P82A, P83S, V84R, L84.1Q, D84.2E, S84.3P, D84.4S, \hat{ }84.4QGT, |
| | G85.4T, S85.3T, F85.1A, L85V, Y86T, K88I, T90R, D92A, K93A, S94E, R95D, Q97K, |
| | Q98K, N100D, V101T, S105M, M107G, H113P, N114L, H115A, Y116F, S120T, L121I, |
| | S122D, L123R, S124L, P125A |
| 61 | Q3E, Y5H, T6L, S10P, R11S, D12E, T15A, \hat{ }15L, K16N, N17E, O18L, S20T, V25A, K26R, |
| | Y29S, E42L, S43Q, N44G, G45S, P45.2E, E45.3L, N45.4P, A45.4RE, N77K, K79L, P82A, |
| | P83S, V84R, L84.1Q, D84.2E, S84.3P, D84.4S, \hat{ }84.4QGT, G85.4T, S85.3T, F85.1A, |
| | L85V, Y86T, K88I, T90R, D92A, K93A, S94E, R95D, Q97K, Q98K, N100D, V101T, S105M, |
| | M107G, H113P, N114L, H115A, Y116F, S120T, L121I, S122D, L123R, S124L, P125A |
| 62 | Q3E, Y5H, T6L, S10P, R11S, D12E, T15A, \hat{ }15L, K16N, N17E, O18L, S20T, V25A, K26R, |
| | Y29S, S31K, I37V, A38L, E40R, N77K, K79L, P82A, P83S, V84R, L84.1Q, D84.2E, |
| | S84.3P, D84.4S, \hat{ }84.4QGT, G85.4T, S85.3T, F85.1A, L85V, Y86T, K88I, T90R, D92A, |
| | K93A, S94E, R95D, Q97K, Q98K, N100D, V101T, S105M, M107G, H113P, N114L, H115A, |
| | Y116F, S120T, L121I, S122D, L123R, S124L, P125A |
| 63 | Q3E, Y5H, T6L, S10P, R11S, D12E, T15A, \hat{ }15L, K16N, N17E, O18L, S20T, V25A, K26R, |
| | Y29S, S31K, I37V, A38L, E40R, E42L, S43Q, N44G, G45S, P45.2E, E45.3L, N45.4P, |
| | \hat{ }45.4RE, \hat{ }84.4QGT, G85.4T, S85.3T, F85.1A, L85V, Y86T, K88I, T90R, D92A, K93A, |
| | S94E, R95D, Q97K, Q98K, N100D, V101T, S105M, M107G, H113P, N114L, H115A, |
| | Y116F, S120T, L121I, S122D, L123R, S124L, P125A |
| 64 | Q3E, Y5H, T6L, S10P, R11S, D12E, T15A, \hat{ }15L, K16N, N17E, O18L, S20T, V25A, K26R, |
| | Y29S, S31K, I37V, A38L, E40R, E42L, S43Q, N44G, G45S, P45.2E, E45.3L, N45.4P, |
| | \hat{ }45.4RE, N77K, K79L, P82A, P83S, V84R, L84.1Q, D84.2E, S84.3P, D84.4S, \hat{ }84.4QGT, |
| | K93A, S94E, R95D, Q97K, Q98K, N100D, V101T, S105M, M107G, H113P, N114L, H115A, |
| | Y116F, S120T, L121I, S122D, L123R, S124L, P125A |
| 65 | Q3E, Y5H, T6L, S10P, R11S, D12E, T15A, \hat{ }15L, K16N, N17E, O18L, S20T, V25A, K26R, |
| | Y29S, S31K, I37V, A38L, E40R, E42L, S43Q, N44G, G45S, P45.2E, E45.3L, N45.4P, |
| | \hat{ }45.4RE, N77K, K79L, P82A, P83S, V84R, L84.1Q, D84.2E, S84.3P, D84.4S, \hat{ }84.4QGT, |
| | G85.4T, S85.3T, F85.1A, L85V, Y86T, K88I, T90R, D92A, V101T, S105M, M107G, H113P, |
| | N114L, H115A, Y116F, S120T, L121I, S122D, L123R, S124L, P125A |
| 66 | Q3E, Y5H, T6L, S10P, R11S, D12E, T15A, \hat{ }15L, K16N, N17E, O18L, S20T, V25A, K26R, |
| | Y29S, S31K, I37V, A38L, E40R, E42L, S43Q, N44G, G45S, P45.2E, E45.3L, N45.4P, |
| | \hat{ }45.4RE, N77K, K79L, P82A, P83S, V84R, L84.1Q, D84.2E, S84.3P, D84.4S, \hat{ }84.4QGT, |
| | G85.4T, S85.3T, F85.1A, L85V, Y86T, K88I, T90R, D92A, K93A, S94E, R95D, Q97K, |
| | Q98K, N100D, H113P, N114L, H115A, Y116F, S120T, L121I, S122D, L123R, S124L, |
| | P125A |
| 67 | Q3E, Y5H, T6L, S10P, R11S, D12E, T15A, \hat{ }15L, K16N, N17E, O18L, S20T, V25A, K26R, |
| | Y29S, S31K, I37V, A38L, E40R, E42L, S43Q, N44G, G45S, P45.2E, E45.3L, N45.4P, |
| | \hat{ }45.4RE, N77K, K79L, P82A, P83S, V84R, L84.1Q, D84.2E, S84.3P, D84.4S, \hat{ }84.4QGT, |
| | G85.4T, S85.3T, F85.1A, L85V, Y86T, K88I, T90R, D92A, K93A, S94E, R95D, Q97K, |
| | Q98K, N100D, V101T, S105M, M107G, S120T, L121I, S122D, L123R, S124L, P125A |
| 68 | Q3E, Y5H, T6L, S10P, R11S, D12E, T15A, \hat{ }15L, K16N, N17E, O18L, S20T, V25A, K26R, |
| | Y29S, S31K, I37V, A38L, E40R, E42L, S43Q, N44G, G45S, P45.2E, E45.3L, N45.4P, |
| | \hat{ }45.4RE, N77K, K79L, P82A, P83S, V84R, L84.1Q, D84.2E, S84.3P, D84.4S, \hat{ }84.4QGT, |
| | G85.4T, S85.3T, F85.1A, L85V, Y86T, K88I, T90R, D92A, K93A, S94E, R95D, Q97K, |
| | Q98K, N100D, V101T, S105M, M107G, H113P, N114L, H115A, Y116F |

TABLE 13
Affinity and maximum response of engineered
immunoglobulin towards hFcαRI
determined by SPR experiment, following
procedure described in Example 5a.

| SEQ ID | Ref | | Maximum response at |
|---|---|---|---|
| NO | number | KD (1:1) (M) | 1000 nM hFcαRI (RU) |
| 2 | 2258 | 2.59E−07 | 263 |
| 58 | 2576 | 4.33E−07 | 160 |
| 59 | 2577 | 6.26E−07 | 62 |
| 60 | 2578 | 0.00E+00 | 0 |
| 61 | 2579 | 1.75E−06 | 25 |
| 62 | 2580 | 2.56E−07 | 17 |
| 63 | 2581 | 1.23E−06 | 155 |
| 64 | 2582 | 3.70E−07 | 12 |
| 65 | 2583 | 9.88E−07 | 148 |
| 66 | 2584 | 0.00E+00 | 0 |
| 67 | 2585 | 0.00E+00 | 0 |
| 68 | 2586 | 5.99E−07 | 233 |

[0240] 1.2.2. Domain Cutting (Top/Down, Front/Side)

[0241] Given their structural similarity, IgG1 and IgA2 CH2 and CH3 can be defined as “building blocks”, with the possibility to cut these domains into pieces. Two different types of sections were cut: (i) a section following the transverse plane (top/down section), and (ii) a section following the frontal plane (front/side section). Final constructs based on an anti-HER2 antibody with a CH1 domain from IgG1, contained IgG1/IgA2 hybrid CH2 or CH3 domains, made of 50% IgA2 and 50% IgG1. The amino acid sequences depicted in SEQ ID NOs: 42 to 45 exemplify the modifications made to the CH2 domain and the amino acid sequences depicted in SEQ ID NOs: 69 and 70 exemplify the modifications made to the CH3 domain by the transverse or frontal plane sectional substitutions. These CH2 and CH3 mutations are shown schematically in FIG. 3c-FIG. 3g, are summarized in Tables 14 and 16 below and their effect on hFcαRI binding is presented in Tables 15 and 17.

TABLE 14
Summary of CH2 mutations (based on sequence SEQ ID NO: 1)

| SEQ | |
|---|---|
| ID NO | CH2 Mutation set (IMGT numbering for C-domain) |
| 42 | P8R, K10A, P11L, K12E, T14L, M15.1L, I15.2#, S16G, R17S, T18E, P19A, E20N, E31A, |
| | D32#, P35S, E36G, V37A, K38T, N40T, Y42T, V43P, D44S, G45S, T90P, V91G, L92C, |
| | H93A, D95P, L97N, N98H, K100E, E101T, Y102F, K103T, K105T, V106A, S107A, N108H, |
| | K109P, A110E, P114K, A115T, I117L, E118T, K119A, T120N, S122T, A124S |
| 43 | A1.6#, P1.5#, E1.4#, L1.3#, L1.2C, G1.1C, G1H, S3R, V4L, F5S, F7H, P8R, K10A, P11L, |
| | K12E, T14L, M15.1L, I15.2#, S16G, R17S, T18E, P19A, E20N, V21L, V24T, V25L, V26T, |
| | D27G, V28L, S29R, H30D, V45.1G, E45.2K, V45.3S, H45.4#, N77#, K79V, T80Q, K81G, |
| | R83P, E84.1R, Q84.2D, Y84.3L, N84.4C, S85.4G, T85.3C, R85.1S, V86S, ET90P, V91G, |
| | L92C, H93A, D95P, L97N, N98H, S122T, A124S |
| 44 | V4L, F5S, F7H, P8R, K10A, P11L, K12E, T14L, M15.1L, I15.2#, S16G, R17S, T18E, P19A, |
| | E20N, V21L, V24T, V25L, N40T, Y42T, V43P, D44S, G45S, V45.1G, E45.2K, V45.3S, |
| | H45.4#, N77#, K79V, V86S, ET90P, V91G, L92C, H93A, D95P, L97N, N98H, K100E, |
| | E101T, Y102F, K103T, K105T, I117L, E118T, K119A, T120N, S122T, A124S |
| 45 | A1.6#, P1.5#, E1.4#, L1.3#, L1.2C, G1.1C, G1H, S3R, P8R, K10A, P11L, K12E, T14L, |
| | M15.1L, I15.2#, S16G, R17S, T18E, P19A, E20N, D27G, V28L, S29R, H30D, E31A, D34#, |
| | P35S, E36G, V37A, K38T, T80Q, K81G, R83P, E84.1R, Q84.2D, Y84.3L, N84.4C, S85.4G, |
| | T85.3C, R85.1S, V86S, ET90P, V91G, L92C, H93A, D95P, L97N, N98H, V106A, S107A, |
| | N108H, K109P, A110E, P114K, A115T S122T, A124S |

TABLE 15
Affinity and maximum response of engineered immunoglobulin
towards hFcαRI determined by surface plasmon resonance, following
the procedure described in Example 5a.

| | | | Maximum response |
|---|---|---|---|
| | | | at 1000 nM hFcαRI |
| SEQ ID NO | Ref number | KD (1:1) (M) | (RU) |
| 2 | 2258 | 2.59E−07 | 263 |
| 42 | 2476 | 0.00E+00 | 0 |
| 43 | 2477 | 0.00E+00 | 0 |
| 44 | 2478 | 0.00E+00 | 0 |
| 45 | 2479 | 1.91E−07 | 233 |
| 45 | 2479 | 2.97E−07 | 187 |

TABLE 16
Summary of CH3 mutations (based on sequence SEQ ID NO: 1)

| SEQ | |
|---|---|
| ID NO | CH3 Mutation set (IMGT numbering for C-domain) |
| 69 | Q3E, Y5H, T6L, V25A, K26R, Y29S, S35K, I37V, A38L, E40R, E42L, S43Q, N44G, G45S, |
| | P45.2E, E45.3L, N45.4P, \hat{ }45.4RE, T81W, P82A, P83S, V84R, L84.1Q, D84.2E, S85.3P, |
| | D84.4S, \hat{ }84.4QGT, G85.4T, S85.3T, F85.1A, L85V, Y86T, S105M, M107G, H113P, |
| | N114L, H115A, Y116F, S120T |
| 70 | S10P, R11S, D12E, T15A, \hat{ }15L, K16N, N17E, Q18L, S20T, A38L, E40R, E42L, S43Q, |
| | N44G, G45S, P45.2E, E45.3L, N45.4P, \hat{ }45.4RE, N77K, K79L, K88I, T90R, D92A, K93A, |
| | S94E, R95D, Q97K, Q98K, N100D, V101T, S105M, M107G, H113P, N114L, H115A, |
| | Y116F, S120T, L121I, S122D, L123R, S124L, P125A |

TABLE 17
Affinity and maximum response of engineered immunoglobulin
towards hFcαRI determined by surface plasmon resonance,
following the procedure described in Example 5a.

| | | | Maximum response |
|---|---|---|---|
| | | | at 1000 nM hFcαRI |
| SEQ ID NO | Ref number | KD (1:1) (M) | (RU) |
| 2 | 2258 | 2.59E−07 | 263 |
| 69 | 2587 | 0.00E+00 | 0 |
| 70 | 2588 | 1.92E−06 | 94 |

[0242] 1.2.3. Top-CH2 Disulfide Node, CH3-Exposed Alpha Helix

[0243] Semi-rational design was used to determine which amino acid residues of the Fc region of IgA2 are necessary to interact with hFcαRI, despite their apparent unrelated role in such an interaction, or the long distance separating these residues from the hFcαRI interface. It was found that disulfide bonds and packed loops spatially located on top of the CH2 domain of IgA2 (shown in FIG. 9) play an important role in the correct positioning of CH2 domain residues at the hFcαRI binding site. Such an effect was very surprising to discover since this part of the CH2 domain is found distant to the binding site when IgA2 binds to hFcαRI. It was also found that alpha-helices located on the CH3 domain of IgA2, that are exposed by solvent and located far from hFcαRI, have an impact on IgA2 Fc/hFcαRI interactions. The amino acid sequences depicted in SEQ ID NOs: 49 to 57 and 73 to 79 exemplify the modifications made to the CH2 domain to determine residues involved in indirect hFcαRI binding. The amino acid sequences depicted in SEQ ID NOs: 80 to 99 exemplify the modifications made to the CH3 domain to determine residues involved in indirect hFcαRI binding. These CH2 and CH3 mutations are shown schematically in FIG. 3h and FIG. 3i, are summarized in Tables 18 and 20 below and their effect on hFcαRI binding is presented in Tables 19 and 21.

TABLE 18
Summary of CH2 mutations (based on sequence SEQ ID NO: 1)

| SEQ | |
|---|---|
| ID NO | CH2 Mutation set (IMGT numbering for C-domain) |
| 49 | P8R, K10A, P11L, K12E, T14L, M15.1L, I15.2#, S16G, R17S, T18E, P19A, E20N, V26T, |
| | D27D, V28L, S29R, H30D, E31A, D34#, P35S, E36G, V37A, K38T, T80Q, K81G, R83P, |
| | E84.1R, Q84.2D, Y84.3L, N84.4C, S85.4G, T85.3C, R85.1S, T90P, V91G, L92C, H93A, |
| | D95P, L97N, N98H, V106A, S107A, N108H, K109P, A110E, P114K, A115T, S122T, A124S |
| 50 | A1.6#, P1.5#, E1.4#, L1.3#, L1.2C, G1.1C, G1H, S3R, P8R, K10A, P11L, K12E, T14L, |
| | M15.1L, I15.2#, S16G, R17S, T18E, P19A, E20N, V26T, D27D, V28L, S29R, H30D, T80Q, |
| | K81G, R83P, E84.1R, Q84.2D, Y84.3L, N84.4C, S85.4G, T85.3C, R85.1S, T90P, V91G, |
| | L92C, H93A, D95P, L97N, N98H, V106A, S107A, N108H, K109P, A110E, P114K, A115T, |
| | S122T, A124S |
| 51 | A1.6#, P1.5#, E1.4#, L1.3#, L1.2C, G1.1C, G1H, S3R, P8R, K10A, P11L, K12E, T14L, |
| | M15.1L, I15.2#, S16G, R17S, T18E, P19A, E20N, V26T, D27D, V28L, S29R, H30D, E31A, |
| | D34#, P35S, E36G, V37A, K38T, N84.4C, S85.4G, T85.3C, R85.1S, T90P, V91G, L92C, |
| | H93A, D95P, L97N, N98H, V106A, S107A, N108H, K109P, A110E, P114K, A115T, S122T, |
| | A124S |
| 52 | A1.6#, P1.5#, E1.4#, L1.3#, L1.2C, G1.1C, G1H, S3R, P8R, K10A, P11L, K12E, T14L, |
| | M15.1L, I15.2#, S16G, R17S, T18E, P19A, E20N, V26T, D27D, V28L, S29R, H30D, E31A, |
| | D34#, P35S, E36G, V37A, K38T, T80Q, K81G, R83P, E84.1R, Q84.2D, Y84.3L, N84.4C, |
| | S85.4G, T85.3C, R85.1S, T90P, V91G, L92C, H93A, D95P, L97N, N98H, P114K, A115T, |
| | S122T, A124S |
| 53 | A1.6#, P1.5#, E1.4#, L1.3#, L1.2C, G1.1C, G1H, S3R, P8R, K10A, P11L, K12E, T14L, |
| | M15.1L, I15.2#, S16G, R17S, T18E, P19A, E20N, V26T, D27D, V28L, S29R, H30D, E31A, |
| | D34#, P35S, E36G, V37A, K38T, T80Q, K81G, R83P, E84.1R, Q84.2D, Y84.3L, N84.4C, |
| | S85.4G, T85.3C, R85.1S, T90P, V91G, L92C, H93A, D95P, L97N, N98H, V106A, S107A, |
| | N108H, K109P, A110E, S122T, A124S |
| 54 | P8R, K10A, P11L, K12E, T14L, M15.1L, I15.2#, S16G, R17S, T18E, P19A, E20N, V26T, |
| | D27D, V28L, S29R, H30D, N84.4C, S85.4G, T85.3C, R85.1S, T90P, V91G, L92C, H93A, |
| | D95P, L97N, N98H, V106A, S107A, N108H, K109P, A110E, S122T, A124S |
| 55 | P8R, K10A, P11L, K12E, T14L, M15.1L, I15.2#, S16G, R17S, T18E, P19A, E20N, V26T, |
| | D27D, V28L, S29R, H30D, N84.4C, S85.4G, T85.3C, R85.1S, T90P, V91G, L92C, H93A, |
| | D95P, L97N, N98H, S122T, A124S |
| 56 | A1.6#, P1.5#, E1.4#, L1.3#, L1.2C, G1.1C, G1H, S3R, P8R, K10A, P11L, K12E, T14L, |
| | M15.1L, I15.2#, S16G, R17S, T18E, P19A, E20N, V26T, D27D, V28L, S29R, H30D, |
| | N84.4C, S85.4G, T85.3C, R85.1S, T90P, V91G, L92C, H93A, D95P, L97N, N98H, V106A, |
| | S107A, N108H, K109P, A110E, S122T, A124S |
| 57 | A1.6#, P1.5#, E1.4#, L1.3#, L1.2C, G1.1C, G1H, S3R, P8R, K10A, P11L, K12E, T14L, |
| | M15.1L, I15.2#, S16G, R17S, T18E, P19A, E20N, V26T, D27D, V28L, S29R, H30D, |
| | N84.4C, S85.4G, T85.3C, R85.1S, T90P, V91G, L92C, H93A, D95P, L97N, N98H, S122T, |
| | A124S |
| 73 | A1.6#, P1.5#, E1.4#, L1.3#, L1.2C, G1.1C, G1H, S3R, P8R, K10A, P11L, K12E, T14L, |
| | M15.1L, I15.2#, S16G, R17S, T18E, P19A, E20N, N84.4C, S85.4G, T85.3C, R85.1S, |
| | T90P, V91G, L92C, H93A, D95P, L97N, N98H, V106A, S107A, N108H, K109P, A110E, |
| | S122T, A124S |
| 74 | A1.6#, P1.5#, E1.4#, L1.3#, L1.2C, G1.1C, G1H, S3R, P8R, K10A, P11L, K12E, T14L, |
| | M15.1L, I15.2#, S16G, R17S, T18E, P19A, E20N, N84.4C, S85.4G, T85.3C, R85.1S, |
| | T90P, V91G, L92C, H93A, D95P, L97N, N98H, S122T, A124S |
| 75 | A1.6#, P1.5#, E1.4#, L1.3#, L1.2C, G1.1C, G1H, S3R, P8R, K10A, P11L, K12E, T14L, |
| | M15.1L, I15.2#, S16G, R17S, T18E, P19A, E20N, V26T, D27D, V28L, S29R, H30D, T90P, |
| | V91G, L92C, H93A, D95P, L97N, N98H, V106A, S107A, N108H, K109P, A110E, S122T, |
| | A124S |
| 76 | A1.6#, P1.5#, E1.4#, L1.3#, L1.2C, G1.1C, G1H, S3R, P8R, K10A, P11L, K12E, T14L, |
| | M15.1L, I15.2#, S16G, R17S, T18E, P19A, E20N, V26T, D27D, V28L, S29R, H30D, T90P, |
| | V91G, L92C, H93A, D95P, L97N, N98H, S122T, A124S |
| 77 | P8R, K10A, P11L, K12E, T14L, M15.1L, I15.2#, S16G, R17S, T18E, P19A, E20N, V26T, |
| | D27D, V28L, S29R, H30D, T90P, V91G, L92C, H93A, D95P, L97N, N98H, V106A, S107A, |
| | N108H, K109P, A110E, S122T, A124S |
| 78 | P8R, K10A, P11L, K12E, T14L, M15.1L, I15.2#, S16G, R17S, T18E, P19A, E20N, V26T, |
| | D27D, V28L, S29R, H30D, T90P, V91G, L92C, H93A, D95P, L97N, N98H, S122T, A124S |
| 79 | A1.6#, P1.5#, E1.4#, L1.3#, L1.2C, G1.1C, G1H, S3R, P8R, K10A, P11L, K12E, T14L, |
| | M15.1L, I15.2#, S16G, R17S, T18E, P19A, E20N, V26T, D27D, V28L, S29R, H30D, |
| | N84.4C, S85.4G, T85.3C, R85.1S, V106A, S107A, N108H, K109P, A110E, S122T, A124S |

TABLE 19
Affinity and maximum response of engineered immunoglobulin
towards hFcαRI determined by surface plasmon resonance,
following the procedure described in Example 5a.

| | | | Maximum response |
|---|---|---|---|
| | | | at 1000 nM hFcαRI |
| SEQ ID NO | Ref number | KD (1:1) (M) | (RU) |
| 2 | 2258 | 2.59E−07 | 263 |
| 49 | 2564 | 1.51E−07 | 179 |
| 50 | 2565 | 1.44E−07 | 213 |
| 51 | 2566 | 2.10E−07 | 229 |
| 52 | 2567 | 2.71E−07 | 214 |
| 53 | 2568 | 1.43E−07 | 231 |
| 54 | 2569 | 7.05E−07 | 20 |
| 55 | 2570 | 1.67E−07 | 129 |
| 56 | 2571 | 2.26E−07 | 209 |
| 57 | 2572 | 2.90E−07 | 220 |
| 73 | 2683 | 4.84E−07 | 54 |
| 74 | 2684 | 4.11E−07 | 54 |
| 75 | 2685 | 3.72E−07 | 20 |
| 76 | 2686 | 6.61E−07 | 22 |
| 77 | 2687 | 0.00E+00 | 0 |
| 78 | 2688 | 4.44E−07 | 20 |
| 79 | 2689 | 5.67E−07 | 200 |

TABLE 20
Summary of CH3 mutations (based on sequence SEQ ID NO: 1)

| SEQ | |
|---|---|
| ID NO | CH3 Mutation set (IMGT numbering for C-domain) |
| 80 | S35K, I37V, A38L, E40R, E42L, S43Q, N44G, G45S, P45.2E, E45.3L, N45.4P, \hat{ }45.4RE, |
| | \hat{ }84.4QGT, G85.4T, S85.3T, F85.1A, L85V, Y86T, K88I, T90R, D92A, V101T, S105M, |
| | M107G, H113P, N114L, H115A, Y116F, S120T |
| 81 | A38L, E40R, E42L, S43Q, N44G, G45S, P45.2E, E45.3L, N45.4P, \hat{ }45.4RE, \hat{ }84.4QGT, |
| | G85.4T, S85.3T, F85.1A, L85V, Y86T, K88I, T90R, D92A, V101T, S105M, M107G, H113P, |
| | N114L, H115A, Y116F, S120T |
| 82 | E40R, E42L, S43Q, N44G, G45S, P45.2E, E45.3L, N45.4P, \hat{ }45.4RE, \hat{ }84.4QGT, G85.4T, |
| | S85.3T, F85.1A, L85V, Y86T, K88I, T90R, D92A, V101T, S105M, M107G, H113P, N114L, |
| | H115A, Y116F, S120T |
| 83 | S35K, I37V, A38L, E40R, E42L, S43Q, N44G, G45S, P45.2E, E45.3L, N45.4P, \hat{ }45.4RE, |
| | G85.4T, S85.3T, F85.1A, L85V, Y86T, K88I, T90R, D92A, V101T, S105M, M107G, H113P, |
| | N114L, H115A, Y116F, S120T |
| 84 | S35K, I37V, A38L, E40R, E42L, S43Q, N44G, G45S, P45.2E, E45.3L, N45.4P, \hat{ }45.4RE, |
| | K88I, T90R, D92A, V101T, S105M, M107G, H113P, N114L, H115A, Y116F, S120T |
| 85 | E40R, E42L, S43Q, N44G, G45S, P45.2E, E45.3L, N45.4P, \hat{ }45.4RE, K88I, T90R, D92A, |
| | V101T, S105M, M107G, H113P, N114L, H115A, Y116F, S120T |
| 86 | S35K, I37V, A38L, E40R, E42L, S43Q, N44G, G45S, P45.2E, E45.3L, N45.4P, \hat{ }45.4RE, |
| | V101T, S105M, M107G, H113P, N114L, H115A, Y116F, S120T |
| 87 | R1.1F, T6L, S10P, D12E, T15A, \hat{ }15L, K16N, N17E, Q18L, V25A, Y29S, S35K, I37V, |
| | A38L, E40R, E42L, S43Q, N44G, G45S, P45.2E, E45.3L, N45.4P, \hat{ }45.4RE, P82A, P83S, |
| | L84.1Q, D84.2E, S84.3P, D84.4S, \hat{ }84.4QGT, G85.4T, L85V, D92A, K93A, S94E, R95D, |
| | Q97K, Q98K, N100D, V101T, S105M, M107G, H113P, N114L, H115A, Y116F, L121I, |
| | L123R |
| 88 | R1.1F, T6L, V25A, Y29S, S35K, I37V, A38L, E40R, E42L, S43Q, N44G, G45S, P45.2E, |
| | E45.3L, N45.4P, \hat{ }45.4RE, P82A, P83S, L84.1Q, D84.2E, S84.3P, D84.4S, \hat{ }84.4QGT, |
| | G85.4T, L85V, D92A, K93A, S94E, R95D, Q97K, Q98K, N100D, V101T, S105M, M107G, |
| | H113P, N114L, H115A, Y116F, L121I, L123R |
| 89 | T6L, V25A, S35K, I37V, A38L, E40R, E42L, S43Q, N44G, G45S, P45.2E, E45.3L, N45.4P, |
| | \hat{ }45.4RE, P82A, P83S, L85V, D92A, K93A, S94E, R95D, Q97K, Q98K, N100D, V101T, |
| | S105M, M107G, H113P, N114L, H115A, Y116F, L121I, L123R |
| 90 | T6L, S10P, D12E, T15A, \hat{ }15L, K16N, N17E, Q18L, V25A, S35K, I37V, A38L, E40R, E42L, |
| | S43Q, N44G, G45S, P45.2E, E45.3L, N45.4P, \hat{ }45.4RE, P82A, P83S, L85V, D92A, K93A, |
| | S94E, R95D, Q97K, Q98K, N100D, V101T, S105M, M107G, H113P, N114L, H115A, |
| | Y116F, L121I, L123R |
| 91 | T6L, S10P, D12E, T15A, \hat{ }15L, K16N, N17E, Q18L, V25A, S35K, I37V, A38L, E40R, E42L, |
| | S43Q, N44G, G45S, P45.2E, E45.3L, N45.4P, \hat{ }45.4RE, P82A, P83S, L85V, S105M, |
| | M107G, H113P, N114L, H115A, Y116F, L121I |
| 92 | R1.1F, T6L, S10P, D12E, T15A, \hat{ }15L, K16N, N17E, Q18L, V25A, Y29S, S35K, I37V, |
| | A38L, E40R, E42L, S43Q, N44G, G45S, P45.2E, E45.3L, N45.4P, \hat{ }45.4RE, P82A, P83S, |
| | L84.1Q, D84.2E, S84.3P, D84.4S, \hat{ }84.4QGT, G85.4T, L85V, S105M, M107G, H113P, |
| | N114L, H115A, Y116F, L121I |
| 93 | R1.1F, T6L, V25A, Y29S, S35K, I37V, A38L, E40R, E42L, S43Q, N44G, G45S, P45.2E, |
| | E45.3L, N45.4P, \hat{ }45.4RE, P82A, P83S, L84.1Q, D84.2E, S84.3P, D84.4S, \hat{ }84.4QGT, |
| | G85.4T, L85V, S105M, M107G, H113P, N114L, H115A, Y116F, L121I |
| 94 | T6L, V25A, S35K, I37V, A38L, E40R, E42L, S43Q, N44G, G45S, P45.2E, E45.3L, N45.4P, |
| | \hat{ }45.4RE, P82A, P83S, L85V, S105M, M107G, H113P, N114L, H115A, Y116F, L121I |
| 95 | Q1.3N, P1.2T, R1.1F, E1R, T6L, V25A, Y29S, S35K, I37V, A38L, E40R, E42L, S43Q, |
| | N44G, G45S, P45.2E, E45.3L, N45.4P, \hat{ }45.4RE, P82A, P83S, L84.1Q, D84.2E, S84.3P, |
| | D84.4S, \hat{ }84.4QGT, G85.4T, S85.3T, L85V, S105M, M107G, H113P, N114L, H115A, |
| | Y116F, L121I |
| 96 | Q1.3N, P1.2T, R1.1F, E1R, T6L, V25A, Y29S, S35K, I37V, A38L, E40R, E42L, S43Q, |
| | N44G, G45S, P45.2E, E45.3L, N45.4P, \hat{ }45.4RE, P82A, P83S, L84.1Q, D84.2E, S84.3P, |
| | D84.4S, \hat{ }84.4QGT, G85.4T, S85.3T, L85V, D92A, K93A, S94E, R95D, Q97K, Q98K, |
| | N100D, V101T, S105M, M107G, H113P, N114L, H115A, Y116F, L121I, L123R |
| 97 | Q1.3N, P1.2T, R1.1F, E1R, T6L, S10P, D12E, T15A, \hat{ }15L, K16N, N17E, Q18L, V25A, |
| | Y29S, S35K, I37V, A38L, E40R, E42L, S43Q, N44G, G45S, P45.2E, E45.3L, N45.4P, |
| | \hat{ }45.4RE, P82A, P83S, L84.1Q, D84.2E, S84.3P, D84.4S, \hat{ }84.4QGT, G85.4T, S85.3T, |
| | L85V, S105M, M107G, H113P, N114L, H115A, Y116F, L121I |
| 98 | Q1.3N, P1.2T, R1.1F, E1R, T6L, S10P, D12E, T15A, \hat{ }15L, K16N, N17E, Q18L, V25A, |
| | Y29S, S35K, I37V, A38L, E40R, E42L, S43Q, N44G, G45S, P45.2E, E45.3L, N45.4P, |
| | \hat{ }45.4RE, P82A, P83S, L84.1Q, D84.2E, S84.3P, D84.4S, \hat{ }84.4QGT, G85.4T, S85.3T, |
| | L85V, D92A, K93A, S94E, R95D, Q97K, Q98K, N100D, V101T, S105M, M107G, H113P, |
| | N114L, H115A, Y116F, L121I, L123R |
| 99 | Q1.3N, P1.2T, R1.1F, E1R, T6L, S10P, D12E, T15A, \hat{ }15L, K16N, N17E, Q18L, V25A, |
| | Y29S, S35K, I37V, A38L, E40R, E42L, S43Q, N44G, G45S, P45.2E, E45.3L, N45.4P, |
| | \hat{ }45.4RE, P82A, P83S, L84.1Q, D84.2E, S84.3P, D84.4S, A84.4QGT, G85.4T, S85.3T, |
| | F85.1A, L85V, Y86T, K88I, T90R, D92A, K93A, S94E, R95D, Q97K, Q98K, N100D, V101T, |
| | S105M, M107G, H113P, N114L, H115A, Y116F, L121I, L123R |

TABLE 21
Affinity and maximum response of engineered immunoglobulin
towards hFcαRI determined by surface plasmon resonance,
following the procedure described in Example 5a.

| | | | Maximum response |
|---|---|---|---|
| | | | at 1000 nM hFcαRI |
| SEQ ID NO | Ref number | KD (1:1) (M) | (RU) |
| 2 | 2258 | 2.59E−07 | 263 |
| 80 | 2696 | 3.56E−06 | 50 |
| 81 | 2697 | 6.32E−06 | 32 |
| 82 | 2698 | 0.00E+00 | 6 |
| 83 | 2699 | 4.65E−06 | 43 |
| 84 | 2700 | 3.66E−06 | 43 |
| 85 | 2701 | 1.62E−06 | 20 |
| 86 | 2702 | 1.68E−06 | 89 |
| 87 | 2703 | 5.89E−07 | 103 |
| 88 | 2704 | 5.50E−07 | 225 |
| 89 | 2705 | 6.60E−07 | 271 |
| 90 | 2706 | 6.08E−07 | 288 |
| 91 | 2707 | 8.44E−07 | 200 |
| 92 | 2708 | 8.43E−07 | 200 |
| 93 | 2709 | 1.14E−06 | 171 |
| 94 | 2710 | 1.04E−06 | 213 |
| 95 | 2711 | 1.30E−06 | 164 |
| 96 | 2712 | 8.98E−07 | 240 |
| 97 | 2713 | 1.30E−06 | 167 |
| 98 | 2714 | 7.34E−07 | 257 |
| 99 | 2715 | 2.14E−06 | 117 |

[0244] 1.3 Summary of Rational and Semi Rational Design to Generate Homodimers

[0245] The preferred engineered sequences from IgG1 CH2, CH3 and CH2/CH3 elbows identified as described above, were assembled together to generate an engineered IgG1 that was able to retain the hFcαRI binding capacity of an IgA immunoglobulin. The preferred structures depicting the positions of the CH2 and CH3 mutations are shown schematically in FIG. 4a and FIG. 4b. The CH2 and CH3 mutations of the engineered sequences are listed in Table 22. The binding to hFcαRI was characterized by surface plasmon resonance, as shown in Table 23 and Table 24. The resulting engineered immunoglobulins had hFcαRI binding in the range from parental IgA2-like binding to about 10-fold lower binding than parental IgA2.

[0246] Lead candidates selected from this round of engineering comprised SEQ ID NOs: 119, 120, 122 and 123 and the corresponding binding data towards hFcαRI are presented in Table 24. These candidates were then tested in an ADCC and ADCP assay following the procedure described in Examples 6 and 7, respectively. The results are shown in FIGS. 10, 11 and 12. Engineered IgG1 immunoglobulins comprising SEQ ID NOs: 119, 120, 122 and 123 were shown to have an improved efficacy compared to parental IgA2 in a SK-BR-3 cell PMN killing assay (FIG. 10). As shown in FIG. 11, the engineered IgG1 immunoglobulin comprising SEQ ID NO: 122 was shown to have an efficacy comparable to parental IgA2 in a Calu-3 cell PMN killing assay. The phagocytosis activity of the engineered IgG1 immunoglobulin comprising SEQ ID NO: 122 was determined in an ADCP assay and is shown in FIG. 12. The phagocytosis activity of this immunoglobulin was shown to be comparable to both wild-type IgG1 (SEQ ID NO: 1) and parental IgA2 (SEQ ID NO: 3).

TABLE 22
Summary of CH2 and CH3 mutations (based on sequence SEQ ID NO: 1)

| SEQ | |
|---|---|
| ID NO | CH2 and CH3 Mutation set (IMGT numbering for C-domain) |
| 100 | CH2: L1.2C, G1.1C, G1H, S3R, P8R, K10A, P11L, K12E, T14L, M15.1L, I15.2#, S16G, |
| | R17S, T18E, P19A, E20N, V26T, D27G, V28L, S29R, H30D, N84.4C, S85.4G, T85.3C, |
| | R85.1S, T90P, V91G, L92C, H93A, D95P, L97N, N98H, V106A, S107A, N108H, K109P, |
| | A110E |
| | CH3: A38L, E40R, E42L, S43Q, N44G, G45S, P45.2E, E45.3L, N45.4P, \hat{ }45.4RE, V101T, |
| | S105M, M107G, H113P, N114L, H115A, Y116F, S120T |
| 101 | CH2: L1.2C, G1.1C, G1H, S3R, P8R, K10A, P11L, K12E, T14L, M15.1L, I15.2#, S16G, |
| | R17S, T18E, P19A, E20N, V26T, D27G, V28L, S29R, H30D, N84.4C, S85.4G, T85.3C, |
| | R85.1S, T90P, V91G, L92C, H93A, D95P, L97N, N98H, V106A, S107A, N108H, K109P, |
| | A110E |
| | CH3: T6L, V25A, S35K, I37V, A38L, E40R, E42L, S43Q, N44G, G45S, P45.2E, E45.3L, |
| | N45.4P, \hat{ }45.4RE, P82A, P83S, L85V, D92A, K93A, S94E, R95D, Q97K, Q98K, N100D, |
| | V101T, S105M, M107G, H113P, N114L, H115A, Y116F, L121I, L123R |
| 102 | CH2: L1.2C, G1.1C, G1H, S3R, P8R, K10A, P11L, K12E, T14L, M15.1L, I15.2#, S16G, |
| | R17S, T18E, P19A, E20N, V26T, D27G, V28L, S29R, H30D, N84.4C, S85.4G, T85.3C, |
| | R85.1S, T90P, V91G, L92C, H93A, D95P, L97N, N98H, V106A, S107A, N108H, K109P, |
| | A110E |
| | CH3: T6L, V25A, S35K, I37V, A38L, E40R, E42L, S43Q, N44G, G45S, P45.2E, E45.3L, |
| | N45.4P, \hat{ }45.4RE, P82A, P83S, L85V, S105M, M107G, H113P, N114L, H115A, Y116F, |
| | L121I |
| 103 | CH2: L1.2C, G1.1C, G1H, S3R, P8R, K10A, P11L, K12E, T14L, M15.1L, I15.2#, S16G, |
| | R17S, T18E, P19A, E20N, V26T, D27G, V28L, S29R, H30D, N84.4C, S85.4G, T85.3C, |
| | R85.1S, V106A, S107A, N108H, K109P, A110E |
| | CH3: A38L, E40R, E42L, S43Q, N44G, G45S, P45.2E, E45.3L, N45.4P, \hat{ }45.4RE, V101T, |
| | S105M, M107G, H113P, N114L, H115A, Y116F, S120T |
| 104 | CH2: L1.2C, G1.1C, G1H, S3R, P8R, K10A, P11L, K12E, T14L, M15.1L, I15.2#, S16G, |
| | R17S, T18E, P19A, E20N, V26T, D27G, V28L, S29R, H30D, N84.4C, S85.4G, T85.3C, |
| | R85.1S, V106A, S107A, N108H, K109P, A110E |
| | CH3: T6L, V25A, S35K, I37V, A38L, E40R, E42L, S43Q, N44G, G45S, P45.2E, E45.3L, |
| | N45.4P, \hat{ }45.4RE, P82A, P83S, L85V, D92A, K93A, S94E, R95D, Q97K, Q98K, N100D, |
| | V101T, S105M, M107G, H113P, N114L, H115A, Y116F, L121I, L123R |
| 105 | CH2: L1.2C, G1.1C, G1H, S3R, P8R, K10A, P11L, K12E, T14L, M15.1L, I15.2#, S16G, |
| | R17S, T18E, P19A, E20N, V26T, D27G, V28L, S29R, H30D, N84.4C, S85.4G, T85.3C, |
| | R85.1S, V106A, S107A, N108H, K109P, A110E |
| | CH3: T6L, V25A, S35K, I37V, A38L, E40R, E42L, S43Q, N44G, G45S, P45.2E, E45.3L, |
| | N45.4P, \hat{ }45.4RE, P82A, P83S, L85V, S105M, M107G, H113P, N114L, H115A, Y116F, |
| | L121I |
| 106 | CH2: L1.2C, G1.1C, G1H, S3R, P8R, K10A, P11L, K12E, T14L, M15.1L, I15.2#, S16G, |
| | R17S, T18E, P19A, E20N, V26T, D27G, V28L, S29R, H30D, N84.4C, S85.4G, T85.3C, |
| | R85.1S, T90P, V91G, L92C, H93A, D95P, L97N, N98H |
| | CH3: A38L, E40R, E42L, S43Q, N44G, G45S, P45.2E, E45.3L, N45.4P, \hat{ }45.4RE, V101T, |
| | S105M, M107G, H113P, N114L, H115A, Y116F, S120T |
| 107 | CH2: L1.2C, G1.1C, G1H, S3R, P8R, K10A, P11L, K12E, T14L, M15.1L, I15.2#, S16G, |
| | R17S, T18E, P19A, E20N, V26T, D27G, V28L, S29R, H30D, N84.4C, S85.4G, T85.3C, |
| | R85.1S, T90P, V91G, L92C, H93A, D95P, L97N, N98H |
| | CH3: T6L, V25A, S35K, I37V, A38L, E40R, E42L, S43Q, N44G, G45S, P45.2E, E45.3L, |
| | N45.4P, \hat{ }45.4RE, P82A, P83S, L85V, D92A, K93A, S94E, R95D, Q97K, Q98K, N100D, |
| | V101T, S105M, M107G, H113P, N114L, H115A, Y116F, L121I, L123R |
| 108 | CH2: A1.6#, P1.5#, E1.4#, L1.3#, L1.2C, G1.1C, G1H, S3R, P8R, K10A, P11L, K12E, |
| | T14L, M15.1L, I15.2#, S16G, R17S, T18E, P19A, E20N, V26T, D27G, V28L, S29R, H30D, |
| | N84.4C, S85.4G, T85.3C, R85.1S, T90P, V91G, L92C, H93A, D95P, L97N, N98H |
| | CH3: T6L, V25A, S35K, I37V, A38L, E40R, E42L, S43Q, N44G, G45S, P45.2E, E45.3L, |
| | N45.4P, \hat{ }45.4RE, P82A, P83S, L85V, S105M, M107G, H113P, N114L, H115A, Y116F, |
| | L121I |
| 109 | CH2: A1.6#, P1.5#, E1.4#, L1.3#, L1.2C, G1.1C, G1H, S3R, P8R, K10A, P11L, K12E, |
| | T14L, M15.1L, I15.2#, S16G, R17S, T18E, P19A, E20N, V26T, D27G, V28L, S29R, H30D, |
| | N84.4C, S85.4G, T85.3C, R85.1S |
| | CH3: A38L, E40R, E42L, S43Q, N44G, G45S, P45.2E, E45.3L, N45.4P, \hat{ }45.4RE, V101T, |
| | S105M, M107G, H113P, N114L, H115A, Y116F, S120T |
| 110 | CH2: A1.6#, P1.5#, E1.4#, L1.3#, L1.2C, G1.1C, G1H, S3R, P8R, K10A, P11L, K12E, |
| | T14L, M15.1L, I15.2#, S16G, R17S, T18E, P19A, E20N, V26T, D27G, V28L, S29R, H30D, |
| | N84.4C, S85.4G, T85.3C, R85.1S |
| | CH3: T6L, V25A, S35K, I37V, A38L, E40R, E42L, S43Q, N44G, G45S, P45.2E, E45.3L, |
| | N45.4P, \hat{ }45.4RE, P82A, P83S, L85V, D92A, K93A, S94E, R95D, Q97K, Q98K, N100D, |
| | V101T, S105M, M107G, H113P, N114L, H115A, Y116F, L121I, L123R |
| 111 | CH2: A1.6#, P1.5#, E1.4#, L1.3#, L1.2C, G1.1C, G1H, S3R, P8R, K10A, P11L, K12E, |
| | T14L, M15.1L, I15.2#, S16G, R17S, T18E, P19A, E20N, V26T, D27G, V28L, S29R, H30D, |
| | N84.4C, S85.4G, T85.3C, R85.1S |
| | CH3: T6L, V25A, S35K, I37V, A38L, E40R, E42L, S43Q, N44G, G45S, P45.2E, E45.3L, |
| | N45.4P, \hat{ }45.4RE, P82A, P83S, L85V, S105M, M107G, H113P, N114L, H115A, Y116F, |
| | L121I |
| 112 | CH2: A1.6#, P1.5#, E1.4#, L1.3#, L1.2C, G1.1C, G1H, S3R, P8R, K10A, P11L, K12E, |
| | T14L, M15.1L, I15.2#, S16G, R17S, T18E, P19A, E20N, V26T, D27G, V28L, S29R, H30D, |
| | N84.4C, S85.4G, T85.3C, R85.1S, T90P, V91G, L92C, H93A, D95P, L97N, N98H, V106A, |
| | S107A, N108H, K109P, A110E, K125# |
| | CH3: A38L, E40R, E42L, S43Q, N44G, G45S, P45.2E, E45.3L, N45.4P, \hat{ }45.4RE, V101T, |
| | S105M, M107G, H113P, N114L, H115A, Y116F, S120T |
| 113 | CH2: A1.6#, P1.5#, E1.4#, L1.3#, L1.2C, G1.1C, G1H, S3R, P8R, K10A, P11L, K12E, |
| | T14L, M15.1L, I15.2#, S16G, R17S, T18E, P19A, E20N, V26T, D27G, V28L, S29R, H30D, |
| | N84.4C, S85.4G, T85.3C, R85.1S, T90P, V91G, L92C, H93A, D95P, L97N, N98H, V106A, |
| | S107A, N108H, K109P, A110E, K125# |
| | CH3: T6L, V25A, S35K, I37V, A38L, E40R, E42L, S43Q, N44G, G45S, P45.2E, E45.3L, |
| | N45.4P, \hat{ }45.4RE, P82A, P83S, L85V, D92A, K93A, S94E, R95D, Q97K, Q98K, N100D, |
| | V101T, S105M, M107G, H113P, N114L, H115A, Y116F, L121I, L123R |
| 114 | CH2: A1.6#, P1.5#, E1.4#, L1.3#, L1.2C, G1.1C, G1H, S3R, P8R, K10A, P11L, K12E, |
| | T14L, M15.1L, I15.2#, S16G, R17S, T18E, P19A, E20N, V26T, D27G, V28L, S29R, H30D, |
| | N84.4C, S85.4G, T85.3C, R85.1S, T90P, V91G, L92C, H93A, D95P, L97N, N98H, V106A, |
| | S107A, N108H, K109P, A110E, K125# |
| | CH3: T6L, V25A, S35K, I37V, A38L, E40R, E42L, S43Q, N44G, G45S, P45.2E, E45.3L, |
| | N45.4P, \hat{ }45.4RE, P82A, P83S, L85V, S105M, M107G, H113P, N114L, H115A, Y116F, |
| | L121I |
| 115 | CH2: A1.6#, P1.5#, E1.4#, L1.3#, L1.2C, G1.1C, G1H, S3R, P8R, K10A, P11L, K12E, |
| | T14L, M15.1L, I15.2#, S16G, R17S, T18E, P19A, E20N, V26T, D27G, V28L, S29R, H30D, |
| | N84.4C, S85.4G, T85.3C, R85.1S, K125# |
| | CH3: A38L, E40R, E42L, S43Q, N44G, G45S, P45.2E, E45.3L, N45.4P, \hat{ }45.4RE, V101T, |
| | S105M, M107G, H113P, N114L, H115A, Y116F, S120T |
| 116 | CH2: A1.6#, P1.5#, E1.4#, L1.3#, L1.2C, G1.1C, G1H, S3R, P8R, K10A, P11L, K12E, |
| | T14L, M15.1L, I15.2#, S16G, R17S, T18E, P19A, E20N, V26T, D27G, V28L, S29R, H30D, |
| | N84.4C, S85.4G, T85.3C, R85.1S, K125# |
| | CH3: T6L, V25A, S35K, I37V, A38L, E40R, E42L, S43Q, N44G, G45S, P45.2E, E45.3L, |
| | N45.4P, \hat{ }45.4RE, P82A, P83S, L85V, D92A, K93A, S94E, R95D, Q97K, Q98K, N100D, |
| | V101T, S105M, M107G, H113P, N114L, H115A, Y116F, L121I, L123R |
| 117 | CH2: A1.6#, P1.5#, E1.4#, L1.3#, L1.2C, G1.1C, G1H, S3R, P8R, K10A, P11L, K12E, |
| | T14L, M15.1L, I15.2#, S16G, R17S, T18E, P19A, E20N, V26T, D27G, V28L, S29R, H30D, |
| | N84.4C, S85.4G, T85.3C, R85.1S, K125# |
| | CH3: T6L, V25A, S35K, I37V, A38L, E40R, E42L, S43Q, N44G, G45S, P45.2E, E45.3L, |
| | N45.4P, \hat{ }45.4RE, P82A, P83S, L85V, S105M, M107G, H113P, N114L, H115A, Y116F, |
| | L121I |
| 118 | CH2: A1.6#, P1.5#, E1.4#, L1.3#, L1.2C, G1.1C, G1H, S3R, P8R, K10A, P11L, K12E, |
| | T14L, M15.1L, I15.2#, S16G, R17S, T18E, P19A, E20N, V26T, D27G, V28L, S29R, H30D, |
| | N84.4C, S85.4G, T85.3C, R85.1S, T90P, V91G, L92C, H93A, D95P, L97N, N98H, K125# |
| | CH3: A38L, E40R, E42L, S43Q, N44G, G45S, P45.2E, E45.3L, N45.4P, \hat{ }45.4RE, V101T, |
| | S105M, M107G, H113P, N114L, H115A, Y116F, S120T |
| 119 | CH2: L1.2C, G1.1C, G1H, S3R, P8R, K10A, P11L, K12E, T14L, M15.1L, I15.2#, S16G, |
| | R17S, T18E, P19A, E20N, V26T, D27G, V28L, S29R, H30D, N84.4C, S85.4G, T85.3C, |
| | R85.1S, T90P, V91G, L92C, H93A, D95P, L97N, N98H, K125# |
| | CH3: T6L, V25A, S35K, I37V, A38L, E40R, E42L, S43Q, N44G, G45S, P45.2E, E45.3L, |
| | N45.4P, \hat{ }45.4RE, P82A, P83S, L85V, D92A, K93A, S94E, R95D, Q97K, Q98K, N100D, |
| | V101T, S105M, M107G, H113P, N114L, H115A, Y116F, L121I, L123R |
| 120 | CH2: A1.6#, P1.5#, E1.4#, L1.3#, L1.2C, G1.1C, G1H, S3R, P8R, K10A, P11L, K12E, |
| | T14L, M15.1L, I15.2#, S16G, R17S, T18E, P19A, E20N, V26T, D27G, V28L, S29R, H30D, |
| | N84.4C, S85.4G, T85.3C, R85.1S, T90P, V91G, L92C, H93A, D95P, L97N, N98H, K125# |
| | CH3: T6L, V25A, S35K, I37V, A38L, E40R, E42L, S43Q, N44G, G45S, P45.2E, E45.3L, |
| | N45.4P, \hat{ }45.4RE, P82A, P83S, L85V, S105M, M107G, H113P, N114L, H115A, Y116F, |
| | L121I |
| 121 | CH2: A1.6#, P1.5#, E1.4#, L1.3#, L1.2C, G1.1C, G1H, S3R, P8R, K10A, P11L, K12E, |
| | T14L, M15.1L, I15.2#, S16G, R17S, T18E, P19A, E20N, V26T, D27G, V28L, S29R, H30D, |
| | N84.4C, S85.4G, T85.3C, R85.1S, K125# |
| | CH3: A38L, E40R, E42L, S43Q, N44G, G45S, P45.2E, E45.3L, N45.4P, \hat{ }45.4RE, V101T, |
| | S105M, M107G, H113P, N114L, H115A, Y116F, S120T |
| 122 | CH2: A1.6#, P1.5#, E1.4#, L1.3#, L1.2C, G1.1C, G1H, S3R, P8R, K10A, P11L, K12E, |
| | T14L, M15.1L, I15.2#, S16G, R17S, T18E, P19A, E20N, V26T, D27G, V28L, S29R, H30D, |
| | N84.4C, S85.4G, T85.3C, R85.1S, K125# |
| | CH3: T6L, V25A, S35K, I37V, A38L, E40R, E42L, S43Q, N44G, G45S, P45.2E, E45.3L, |
| | N45.4P, \hat{ }45.4RE, P82A, P83S, L85V, D92A, K93A, S94E, R95D, Q97K, Q98K, N100D, |
| | V101T, S105M, M107G, H113P, N114L, H115A, Y116F, L121I, L123R |
| 123 | CH2: A1.6#, P1.5#, E1.4#, L1.3#, L1.2C, G1.1C, G1H, S3R, P8R, K10A, P11L, K12E, |
| | T14L, M15.1L, I15.2#, S16G, R17S, T18E, P19A, E20N, V26T, D27G, V28L, S29R, H30D, |
| | N84.4C, S85.4G, T85.3C, R85.1S, K125# |
| | CH3: T6L, V25A, S35K, I37V, A38L, E40R, E42L, S43Q, N44G, G45S, P45.2E, E45.3L, |
| | N45.4P, \hat{ }45.4RE, P82A, P83S, L85V, S105M, M107G, H113P, N114L, H115A, Y116F, |
| | L1211 |
| 146 | CH2: P8R, K10A, P11L, K12E, T14L, M15.1L, I15.2#, S16G, R17S, T18E, P19A, E20N, |
| | T90P, V91G, L92C, H93A, D95P, L97N, N98H, K125# |
| | CH3: T6L, V25A, S35K, I37V, A38L, E40R, E42L, S43Q, N44G, G45S, P45.2E, E45.3L, |
| | N45.4P, \hat{ }45.4RE, P82A, P83S, L85V, D92A, K93A, S94E, R95D, Q97K, Q98K, N100D, |
| | V101T, S105M, M107G, H113P, N114L, H115A, Y116F, L121I, L123R |
| 147 | CH2: P8R, K10A, P11L, K12E, T14L, M15.1L, I15.2#, S16G, R17S, T18E, P19A, E20N, |
| | T90P, V91G, L92C, H93A, D95P, L97N, N98H, K125# |
| | CH3: T6L, V25A, S35K, I37V, A38L, E40R, E42L, S43Q, N44G, G45S, P45.2E, E45.3L, |
| | N45.4P, \hat{ }45.4RE, P82A, P83S, L85V, S105M, M107G, H113P, N114L, H115A, Y116F, |
| | L121I |
| 148 | CH2: P8R, K10A, P11L, K12E, T14L, M15.1L, I15.2#, S16G, R17S, T18E, P19A, E20N, |
| | K125# |
| | CH3: T6L, V25A, S35K, I37V, A38L, E40R, E42L, S43Q, N44G, G45S, P45.2E, E45.3L, |
| | N45.4P, \hat{ }45.4RE, P82A, P83S, L85V, D92A, K93A, S94E, R95D, Q97K, Q98K, N100D, |
| | V101T, S105M, M107G, H113P, N114L, H115A, Y116F, L121I, L123R |
| 149 | CH2: P8R, K10A, P11L, K12E, T14L, M15.1L, I15.2#, S16G, R17S, T18E, P19A, E20N, |
| | K125# |
| | CH3: T6L, V25A, S35K, I37V, A38L, E40R, E42L, S43Q, N44G, G45S, P45.2E, E45.3L, |
| | N45.4P, \hat{ }45.4RE, P82A, P83S, L85V, S105M, M107G, H113P, N114L, H115A, Y116F, |
| | L121I |
| 165 | CH2: A1.3L, L1.2C, G1.1C, G1H, S3R, K10A, P11L, K12E, T14L, M15.1L, I15.2#, S16G, |
| | R17S, T18E, P19A, E20N, V26T, D27G, V28L, S29R, H30D, N84.4C, S85.4G, T85.3C, |
| | R85.1S, K125# |
| | CH3: T6L, V25A, S35K, I37V, A38L, E40R, E42L, S43Q, N44G, G45S, P45.2E, E45.3L, |
| | N45.4P, \hat{ }45.4RE, P82A, P83S, L85V, D92A, K93A, S94E, R95D, Q97K, Q98K, N100D, |
| | V101T, S105M, M107G, H113P, N114L, H115A, Y116F, L121I, L123R |
| 166 | CH2: A1.3L, L1.2C, G1.1C, G1H, S3R, K10A, P11L, K12E, T14L, M15.1L, I15.2#, S16G, |
| | R17S, T18E, P19A, E20N, V26T, D27G, V28L, S29R, H30D, K125# |
| | CH3: T6L, V25A, S35K, I37V, A38L, E40R, E42L, S43Q, N44G, G45S, P45.2E, E45.3L, |
| | N45.4P, \hat{ }45.4RE, P82A, P83S, L85V, D92A, K93A, S94E, R95D, Q97K, Q98K, N100D, |
| | V101T, S105M, M107G, H113P, N114L, H115A, Y116F, L121I, L123R |
| 167 | CH2: A1.3L, L1.2C, G1.1C, G1H, S3R, K10A, P11L, K12E, T14L, M15.1L, I15.2#, S16G, |
| | R17S, T18E, P19A, E20N, K125# |
| | CH3: T6L, V25A, S35K, I37V, A38L, E40R, E42L, S43Q, N44G, G45S, P45.2E, E45.3L, |
| | N45.4P, \hat{ }45.4RE, P82A, P83S, L85V, D92A, K93A, S94E, R95D, Q97K, Q98K, N100D, |
| | V101T, S105M, M107G, H113P, N114L, H115A, Y116F, L121I, L123R |
| 168 | CH2: K10A, P11L, K12E, T14L, M15.1L, I15.2#, S16G, R17S, T18E, P19A, E20N, K125# |
| | CH3: T6L, V25A, S35K, I37V, A38L, E40R, E42L, S43Q, N44G, G45S, P45.2E, E45.3L, |
| | N45.4P, \hat{ }45.4RE, P82A, P83S, L85V, D92A, K93A, S94E, R95D, Q97K, Q98K, N100D, |
| | V101T, S105M, M107G, H113P, N114L, H115A, Y116F, L121I, L123R |
| 169 | CH2: K10A, P11L, K12E, T14L, M15.1L, I15.2#, S16G, R17S, T18E, P19A, E20N, V26T, |
| | D27G, V28L, S29R, H30D, K125# |
| | CH3: T6L, V25A, S35K, I37V, A38L, E40R, E42L, S43Q, N44G, G45S, P45.2E, E45.3L, |
| | N45.4P, \hat{ }45.4RE, P82A, P83S, L85V, D92A, K93A, S94E, R95D, Q97K, Q98K, N100D, |
| | V101T, S105M, M107G, H113P, N114L, H115A, Y116F, L121I, L123R |
| 170 | CH2: K10A, P11L, K12E, T14L, M15.1L, I15.2#, S16G, R17S, T18E, P19A, E20N, V26T, |
| | D27G, V28L, S29R, H30D, N84.4C, S85.4G, T85.3C, R85.1S, K125# |
| | CH3: T6L, V25A, S35K, I37V, A38L, E40R, E42L, S43Q, N44G, G45S, P45.2E, E45.3L, |
| | N45.4P, \hat{ }45.4RE, P82A, P83S, L85V, D92A, K93A, S94E, R95D, Q97K, Q98K, N100D, |
| | V101T, S105M, M107G, H113P, N114L, H115A, Y116F, L121I, L123R |
| 171 | CH2: K10A, P11L, K12E, T14L, M15.1L, I15.2#, S16G, R17S, T18E, P19A, E20N, N84.4C, |
| | S85.4G, T85.3C, R85.1S, K125# |
| | CH3: T6L, V25A, S35K, I37V, A38L, E40R, E42L, S43Q, N44G, G45S, P45.2E, E45.3L, |
| | N45.4P, \hat{ }45.4RE, P82A, P83S, L85V, D92A, K93A, S94E, R95D, Q97K, Q98K, N100D, |
| | V101T, S105M, M107G, H113P, N114L, H115A, Y116F, L121I, L123R |
| 172 | CH2: A1.6#, P1.5#, E1.4#, L1.3#, K10A, P11L, K12E, T14L, M15.1L, I15.2#, S16G, R17S, |
| | T18E, P19A, E20N, N84.4C, S85.4G, T85.3C, R85.1S |
| | CH3: T6L, V25A, S35K, I37V, A38L, E40R, E42L, S43Q, N44G, G45S, P45.2E, E45.3L, |
| | N45.4P, \hat{ }45.4RE, P82A, P83S, L85V, |
| 173 | CH2: A1.6#, P1.5#, E1.4#, L1.3#, K10A, P11L, K12E, T14L, M15.1L, I15.2#, S16G, R17S, |
| | T18E, P19A, E20N, K125# |
| | CH3: T6L, V25A, S35K, I37V, A38L, E40R, E42L, S43Q, N44G, G45S, P45.2E, E45.3L, |
| | N45.4P, \hat{ }45.4RE, P82A, P83S, L85V, D92A, K93A, S94E, R95D, Q97K, Q98K, N100D, |
| | V101T, S105M, M107G, H113P, N114L, H115A, Y116F, L121I, L123R |
| 174 | CH2: A1.6#, P1.5#, E1.4#, L1.3#, L1.2C, G1.1C, G1H, S3R, P8R, K10A, P11L, K12E, |
| | T14L, M15.1L, I15.2#, S16G, R17S, T18E, P19A, E20N, V26T, D27G, V28L, S29R, H30D, |
| | N84.4C, S85.4G, T85.3C, R85.1S, K125# |
| | CH3: E1R, Q3E, T6L, V25A, S35K, I37V, A38L, E40R, E42L, S43Q, N44G, G45S, P45.2E, |
| | E45.3L, N45.4P, \hat{ }45.4RE, P82A, P83S, L85V, D92A, K93A, S94E, R95D, Q97K, Q98K, |
| | N100D, V101T, S105M, M107G, H113P, N114L, H115A, Y116F, L121I, L123R |
| 175 | CH2: A1.6#, P1.5#, E1.4#, L1.3#, L1.2C, G1.1C, G1H, S3R, K10A, P11L, K12E, T14L, |
| | M15.1L, I15.2#, S16G, R17S, T18E, P19A, E20N, V26T, D27G, V28L, S29R, H30D, |
| | N84.4C, S85.4G, T85.3C, R85.1S, K125# |
| | CH3: E1R, Q3E, T6L, V25A, S35K, I37V, A38L, E40R, E42L, S43Q, N44G, G45S, P45.2E, |
| | E45.3L, N45.4P, \hat{ }45.4RE, P82A, P83S, L85V, D92A, K93A, S94E, R95D, Q97K, Q98K, |
| | N100D, V101T, S105M, M107G, H113P, N114L, H115A, Y116F, L121I, L123R |
| 176 | CH2: A1.6#, P1.5#, E1.4#, L1.3#, L1.2C, G1.1C, G1H, S3R, P8R, K10A, P11L, K12E, |
| | T14L, M15.1L, I15.2#, S16G, R17S, T18E, P19A, E20N, V26T, D27G, V28L, S29R, H30D, |
| | E31A, D34#, P35S, E36G, V37A, K38T, T80Q, K81G, R83P, E84.1R, Q84.2D, Y84.3L, |
| | N84.4C, S85.4G, T85.3C, R85.1S, T90P, V91G, L92C, H93A, D95P, L97N, N98H, V106A, |
| | S107A, N108H, K109P, A110E, K125# |
| | CH3: T6L, V25A, S35K, I37V, A38L, E40R, E42L, S43Q, N44G, G45S, P45.2E, E45.3L, |
| | N45.4P, \hat{ }45.4RE, P82A, P83S, L85V, D92A, K93A, S94E, R95D, Q97K, Q98K, N100D, |
| | V101T, S105M, M107G, H113P, N114L, H115A, Y116F, L121I, L123R |
| 177 | CH2: A1.6#, P1.5#, E1.4#, L1.3#, L1.2C, G1.1C, G1H, S3R, P8R, K10A, P11L, K12E, |
| | T14L, M15.1L, I15.2#, S16G, R17S, T18E, P19A, E20N, V26T, D27G, V28L, S29R, H30D, |
| | E31A, D34#, P35S, E36G, V37A, K38T, T80Q, K81G, R83P, E84.1R, Q84.2D, Y84.3L, |
| | N84.4C, S85.4G, T85.3C, R85.1S, V106A, S107A, N108H, K109P, A110E, K125# |
| | CH3: T6L, V25A, S35K, I37V, A38L, E40R, E42L, S43Q, N44G, G45S, P45.2E, E45.3L, |
| | N45.4P, \hat{ }45.4RE, P82A, P83S, L85V, D92A, K93A, S94E, R95D, Q97K, Q98K, N100D, |
| | V101T, S105M, M107G, H113P, N114L, H115A, Y116F, L121I, L123R |
| 178 | CH2: A1.3L, L1.2C, G1.1C, G1H, S3R, P8R, K10A, P11L, K12E, T14L, M15.1L, I15.2#, |
| | S16G, R17S, T18E, P19A, E20N, V26T, D27G, V28L, S29R, H30D, E31A, D34#, P35S, |
| | E36G, V37A, K38T, T80Q, K81G, R83P, E84.1R, Q84.2D, Y84.3L, N84.4C, S85.4G, |
| | T85.3C, R85.1S, T90P, V91G, L92C, H93A, D95P, L97N, N98H, V106A, S107A, N108H, |
| | K109P, A110E, K125# |
| | CH3: T6L, V25A, S35K, I37V, A38L, E40R, E42L, S43Q, N44G, G45S, P45.2E, E45.3L, |
| | N45.4P, \hat{ }45.4RE, P82A, P83S, L85V, D92A, K93A, S94E, R95D, Q97K, Q98K, N100D, |
| | V101T, S105M, M107G, H113P, N114L, H115A, Y116F, L121I, L123R |
| 179 | CH2: A1.3L, L1.2C, G1.1C, G1H, S3R, P8R, K10A, P11L, K12E, T14L, M15.1L, I15.2#, |
| | S16G, R17S, T18E, P19A, E20N, V26T, D27G, V28L, S29R, H30D, E31A, D34#, P35S, |
| | E36G, V37A, K38T, T80Q, K81G, R83P, E84.1R, Q84.2D, Y84.3L, N84.4C, S85.4G, |
| | T85.3C, R85.1S, V106A, S107A, N108H, K109P, A110E, K125# |
| | CH3: T6L, V25A, S35K, I37V, A38L, E40R, E42L, S43Q, N44G, G45S, P45.2E, E45.3L, |
| | N45.4P, \hat{ }45.4RE, P82A, P83S, L85V, D92A, K93A, S94E, R95D, Q97K, Q98K, N100D, |
| | V101T, S105M, M107G, H113P, N114L, H115A, Y116F, L121I, L123R |
| 180 | CH2: P8R, K10A, P11L, K12E, T14L, M15.1L, I15.2#, S16G, R17S, T18E, P19A, E20N, |
| | V26T, D27G, V28L, S29R, H30D, E31A, D34#, P35S, E36G, V37A, K38T, T80Q, K81G, |
| | R83P, E84.1R, Q84.2D, Y84.3L, N84.4C, S85.4G, T85.3C, R85.1S, |
| | T90P, V91G, L92C, H93A, D95P, L97N, N98H, V106A, S107A, N108H, K109P, A110E, |
| | K125# |
| | CH3: T6L, V25A, S35K, I37V, A38L, E40R, E42L, S43Q, N44G, G45S, P45.2E, E45.3L, |
| | N45.4P, \hat{ }45.4RE, P82A, P83S, L85V, D92A, K93A, S94E, R95D, Q97K, Q98K, N100D, |
| | V101T, S105M, M107G, H113P, N114L, H115A, Y116F, L121I, L123R |
| 181 | CH2: P8R, K10A, P11L, K12E, T14L, M15.1L, I15.2#, S16G, R17S, T18E, P19A, E20N, |
| | V26T, D27G, V28L, S29R, H30D, E31A, D34#, P35S, E36G, V37A, K38T, T80Q, K81G, |
| | R83P, E84.1R, Q84.2D, Y84.3L, N84.4C, S85.4G, T85.3C, R85.1S, V106A, S107A, |
| | N108H, K109P, A110E, K125# |
| | CH3: T6L, V25A, S35K, I37V, A38L, E40R, E42L, S43Q, N44G, G45S, P45.2E, E45.3L, |
| | N45.4P, \hat{ }45.4RE, P82A, P83S, L85V, D92A, K93A, S94E, R95D, Q97K, Q98K, N100D, |
| | V101T, S105M, M107G, H113P, N114L, H115A, Y116F, L121I, L123R |

TABLE 23
Affinity and maximum response of engineered immunoglobulin
towards hFcαRI determined by surface plasmon resonance,
following the procedure described in Example 5a.

| | | | Maximum response at |
|---|---|---|---|
| SEQ ID NO | Ref number | KD (1:1) (M) | 1000 nM hFcαRI (RU) |
| 2 | 2258 | 5.66E−07 | 80 |
| 100 | 2749 | 1.21E−06 | 27 |
| 101 | 2750 | 1.80E−06 | 24 |
| 102 | 2751 | 1.20E−06 | 38 |
| 103 | 2752 | 8.24E−07 | 34 |
| 104 | 2753 | 2.81E−06 | 75 |
| 105 | 2754 | 1.73E−06 | 70 |
| 106 | 2755 | 9.54E−07 | 28 |
| 107 | 2756 | 2.24E−06 | 76 |
| 108 | 2757 | 2.23E−06 | 68 |
| 109 | 2758 | 8.02E−07 | 27 |
| 110 | 2759 | 3.29E−06 | 80 |
| 111 | 2760 | 2.47E−06 | 74 |
| 112 | 2761 | 1.65E−06 | 52 |
| 113 | 2762 | 7.87E−07 | 118 |
| 114 | 2763 | 1.19E−06 | 76 |
| 115 | 2764 | 1.26E−06 | 55 |
| 116 | 2765 | 1.51E−06 | 137 |
| 117 | 2766 | 1.65E−06 | 92 |
| 118 | 2767 | 2.07E−06 | 62 |
| 119 | 2768 | 8.22E−07 | 156 |
| 120 | 2769 | 1.30E−06 | 142 |
| 121 | 2770 | 2.08E−06 | 71 |
| 122 | 2771 | 1.31E−06 | 150 |
| 123 | 2772 | 1.77E−06 | 120 |

TABLE 24
Affinity and maximum response of engineered immunoglobulin
towards hFcαRI determined by surface plasmon resonance,
following the procedure described in Example 5b.

| | | | Maximum response at |
|---|---|---|---|
| SEQ ID NO | Ref number | KD (1:1) (M) | 1000 nM hFcαRI (RU) |
| 3 | 2737 | 5.20E−07 | 168 |
| 146 | 3082 | 0.00E+00 | 18 |
| 147 | 3083 | 0.00E+00 | 11 |
| 148 | 3084 | 5.09E−07 | 146 |
| 149 | 3085 | 2.22E−07 | 100 |
| 165 | 3014 | 3.04E−07 | 178 |
| 166 | 3015 | 6.36E−07 | 100 |
| 167 | 3016 | 7.17E−07 | 88 |
| 168 | 3017 | 2.54E−07 | 116 |
| 169 | 3018 | 2.26E−07 | 105 |
| 170 | 3019 | 3.51E−07 | 120 |
| 171 | 3020 | 4.00E−07 | 98 |
| 172 | 3021 | 4.74E−07 | 101 |
| 173 | 3022 | 2.28E−07 | 146 |
| 174 | 3023 | 3.42E−07 | 177 |
| 175 | 3024 | 4.40E−07 | 128 |
| 176 | 3025 | 1.64E−07 | 155 |
| 177 | 3026 | 2.85E−07 | 165 |
| 178 | 3027 | 1.40E−07 | 190 |
| 179 | 3028 | 2.85E−07 | 162 |
| 180 | 3029 | 1.92E−07 | 146 |
| 181 | 3030 | 3.58E−07 | 143 |
| 119 | 2768 | 2.22E−07 | 191 |
| 120 | 2769 | 3.18E−07 | 147 |
| 122 | 2771 | 2.70E−07 | 197 |
| 123 | 2772 | 3.72E−07 | 154 |

### Example 2: Restoration of hFcRn Binding, hFcγR Binding and Generation of Heterodimers Combining Alpha/Gamma Effector Functions and hFcRn Binding

[0247] 2.1 hFcRn Binding Restoration for Half-Life Extension

[0248] The key residues of IgG1 Fc that interact with hFcRn are located in the corresponding region of IgA2 Fc (CH3) that is responsible for hFcαRI interactions. For this reason, it was not possible to transfer the complete hFcαRI interaction site from IgA2 CH3 to IgG1 CH3 without losing hFcRn binding capacity. To determine whether hFcRn binding could be conferred to an engineered immunoglobulin comprising CH2 and CH3 domains from IgA2, substitutions to the CH3 domain were made at with the corresponding amino acid residue from IgG1 (shown schematically in FIG. 5a; see Table 25). With these mutations in the engineered immunoglobulin, it was possible to restore hFcRn binding; however this was to the detriment of hFcαR binding and therefore there was some loss of response of the engineered immunoglobulins towards hFcαRI, as shown in Table 25.

TABLE 25
Summary of CH3 mutations (based on parental IgA2 (SEQ ID NO: 3)
and numbered according to IMGT numbering for C-domain), and
affinity and maximum response of engineered immunoglobulins
towards hFcαRI determined by surface plasmon resonance,
following the procedure described in Example 5b

| | | | | Maximum response |
|---|---|---|---|---|
| SEQ ID | CH3 | Ref | KD (1:1) | at 1000 nM |
| NO | Mutation set | number | (M) | hFcαRI (RU) |
| 3 | — | 2737 | 5.20E−07 | 168 |
| 71 | A115H, F116Y | 2591 | 0.00E+00 | 7 |
| 72 | P113H, L114N, | 2592 | 0.00E+00 | 0 |
| | A115H, F116Y | | | |

[0249] 2.2 Gamma Response Restoration

[0250] The engineered immunoglobulins based on an IgG1 Fc region and having mutations to restore IgA binding lacked the ability to recruit gamma effector function by binding to hFcγRs. Therefore, it was necessary to replace IgA residues located in top-CH2 disulfide node region by IgG1 residues. Enhancement of binding to hFcγRs was possible by introducing further mutations to the homodimer. These mutations S239D and 1332E (“SDIE”; EU Numbering; Lazar et al (2006) supra) were introduced into the CH2 domain of both Fc domains of the homodimer (shown schematically in FIG. 5b) and were effective in restoring IgG effector function to the engineered homodimeric immunoglobulin. The amino acid sequences shown in SEQ ID NOs: 150 to 153 include the SDIE mutations and additional mutations which are shown in Table 26 below.

[0251] However, restoration of hFcγRIa and hFcγRIIIa interaction to the engineered homodimeric immunoglobulins reduced binding to hFcαRI, as shown Tables 27, 28 and 29. As can be seen in Table 27, the engineered immunoglobulins comprising a higher content of residues derived from IgA had an improved binding affinity to hFcαRI over engineered immunoglobulins with a lower content of IgA residues. As can be seen in Table 28, engineered immunoglobulins comprising a lower content of residues derived from IgA had an improved binding affinity to hFcγRIa compared to engineered immunoglobulins with a higher content of IgA residues. Binding to hFcγRIa was only observed when the residues spatially located on top of the CH2 were fully derived from IgG1. As can be seen in Table 29, engineered immunoglobulins comprising a lower content of residues derived from IgA had an improved binding affinity to hFcγRIIIa compared to engineered immunoglobulins with a higher content of IgA residues.

[0252] Therefore, it was difficult to maintain both alpha and gamma effector functions at IgA2 or IgG1 level using a homodimeric Fc format. An in vitro PMN/PBMC killing assay and an ADCP assay confirm these observations, as shown in FIGS. 13-16 for the engineered immunoglobulins comprising SEQ ID NOs: 122, 148 and 152.

[0253] Preferred homodimeric engineered IgG1 immunoglobulin candidates having hFcαRI, hFcγRIa and hFcγRIIIa binding properties comprised Fc domains comprised within SEQ ID NOs: 148 and 152.

TABLE 26
Summary of CH2 and CH3 mutations (based on sequence SEQ ID NO: 1)

| SEQ | |
|---|---|
| ID NO | CH2 and CH3 Mutation set (IMGT numbering for C-domain) |
| 150 | CH2: S3D, P8R, K10A, P11L, K12E, T14L, M15.1L, I15.2#, S16G, R17S, T18E, P19A, |
| | E20N, T90P, V91G, L92C, H93A, D95P, L97N, N98H, I117E, K125# |
| | CH3: T6L, V25A, S35K, I37V, A38L, E40R, E42L, S43Q, N44G, G45S, P45.2E, E45.3L, |
| | N45.4P, \hat{ }45.4RE, P82A, P83S, L85V, D92A, K93A, S94E, R95D, Q97K, Q98K, N100D, |
| | V101T, S105M, M107G, H113P, N114L, H115A, Y116F, L121I, L123R |
| 151 | CH2: S3D, P8R, K10A, P11L, K12E, T14L, M15.1L, I15.2#, S16G, R17S, T18E, P19A, |
| | E20N, T90P, V91G, L92C, H93A, D95P, L97N, N98H, I117E, K125# |
| | CH3: T6L, V25A, S35K, I37V, A38L, E40R, E42L, S43Q, N44G, G45S, P45.2E, E45.3L, |
| | N45.4P, \hat{ }45.4RE, P82A, P83S, L85V, S105M, M107G, H113P, N114L, H115A, Y116F, |
| | L121I, |
| 152 | CH2: S3D, P8R, K10A, P11L, K12E, T14L, M15.1L, I15.2#, S16G, R17S, T18E, P19A, |
| | E20N, H17E, K125# |
| | CH3: T6L, V25A, S35K, I37V, A38L, E40R, E42L, S43Q, N44G, G45S, P45.2E, E45.3L, |
| | N45.4P, \hat{ }45.4RE, P82A, P83S, L85V, D92A, K93A, S94E, R95D, Q97K, Q98K, N100D, |
| | V101T, S105M, M107G, H113P, N114L, H115A, Y116F, L121I, L123R |
| 153 | CH2: S3D, P8R, K10A, P11L, K12E, T14L, M15.1L, I15.2#, S16G, R17S, T18E, P19A, |
| | E20N, H17E, K125# |
| | CH3: T6L, V25A, S35K, I37V, A38L, E40R, E42L, S43Q, N44G, G45S, P45.2E, E45.3L, |
| | N45.4P, \hat{ }45.4RE, P82A, P83S, L85V, S105M, M107G, H113P, N114L, H115A, Y116F, |
| | L121I, |

TABLE 27
Affinity and maximum response of engineered immunoglobulins
towards hFcαRI as determined by surface plasmon resonance,
following the procedure described in Example 5b.

| | | | Maximum response |
|---|---|---|---|
| | | | at 1000 nM hFcαRI |
| SEQ ID NO | Ref number | KD (1:1) (M) | (RU) |
| 3 | 2737 | 2.38E−07 | 182 |
| 122 | 2771 | 2.70E−07 | 197 |
| 165 | 3014 | 3.04E−07 | 178 |
| 166 | 3015 | 6.36E−07 | 100 |
| 167 | 3016 | 7.17E−07 | 88 |
| 168 | 3017 | 2.54E−07 | 116 |
| 169 | 3018 | 2.26E−07 | 105 |
| 170 | 3019 | 3.51E−07 | 120 |
| 171 | 3020 | 4.00E−07 | 98 |
| 172 | 3021 | 4.74E−07 | 101 |
| 173 | 3022 | 2.28E−07 | 146 |
| 146 | 3082 | 0.00E+00 | 18 |
| 147 | 3083 | 0.00E+00 | 10 |
| 148 | 3084 | 5.09E−07 | 146 |
| 149 | 3085 | 2.22E−07 | 100 |
| 150 | 3086 | 0.00E+00 | 0 |
| 151 | 3087 | 0.00E+00 | 7 |
| 152 | 3088 | 1.99E−07 | 85 |
| 153 | 3089 | 3.00E−07 | 56 |

TABLE 28
Affinity and maximum response of engineered immunoglobulins
towards hFcγRIa as determined by surface plasmon resonance,
following the procedure described in Example 5b.

| | | | Maximum response at |
|---|---|---|---|
| SEQ ID NO | Ref number | KD (1:1) (M) | 1000 nM hFcγRIa (RU) |
| 1 | 2257 | 3.50E−11 | 208 |
| 3 | 2737 | 0 | 0 |
| 122 | 2771 | 0.00E+00 | 0 |
| 165 | 3014 | 0.00E+00 | 0 |
| 166 | 3015 | 0.00E+00 | 0 |
| 167 | 3016 | 0.00E+00 | 0 |
| 168 | 3017 | 7.96E−10 | 266 |
| 169 | 3018 | 0.00E+00 | 0 |
| 170 | 3019 | 0.00E+00 | 0 |
| 171 | 3020 | 0.00E+00 | 0 |
| 172 | 3021 | 0.00E+00 | 0 |
| 173 | 3022 | 0.00E+00 | 0 |
| 146 | 3082 | 0.00E+00 | 0 |
| 147 | 3083 | 0.00E+00 | 0 |
| 148 | 3084 | 1.26E−09 | 211 |
| 149 | 3085 | 1.38E−09 | 199 |
| 150 | 3086 | 0.00E+00 | 0 |
| 151 | 3087 | 0.00E+00 | 13 |
| 152 | 3088 | 1.06E−10 | 218 |
| 153 | 3089 | 1.40E−10 | 203 |

TABLE 29
Maximum response of engineered immunoglobulins toward
hFcγRIIIa as determined by surface plasmon resonance,
following the procedure described in Example 5b. Maximum
response only was determined to speed up the screening process.

| | | | Maximum response at |
|---|---|---|---|
| SEQ ID NO | Ref number | KD (1:1) (M) | 1000 nM hFcγRIIIa (RU) |
| 1 | 2257 | ND | 164 |
| 3 | 2737 | ND | 0 |
| 122 | 2771 | ND | 0 |
| 168 | 3017 | ND | 0 |
| 146 | 3082 | ND | 0 |
| 147 | 3083 | ND | 0 |
| 148 | 3084 | ND | 23 |
| 149 | 3085 | ND | 16 |
| 150 | 3086 | ND | 0 |
| 151 | 3087 | ND | 0 |
| 152 | 3088 | ND | 62 |
| 153 | 3089 | ND | 53 |

[0254] 2.3 Heterodimeric Fc (Knob into Hole)

[0255] The challenge of trying to maintain both alpha and gamma effector functions at IgA2 or IgG1 level was therefore addressed by using an engineered heterodimeric immunoglobulin Fc region, based on “knob into hole” technology (Merchant et al., (1998) supra). In such a molecule, binding to hFcRn was restored when one half of the IgG1 Fc was engineered to bind to and recruit hFcαRI, and the second half of the IgG1 Fc was kept unchanged. It was also found that when the second half of the IgG1 Fc comprised residues spatially located on top of CH2 that were derived from IgA2, for example, packed loops and disulfide bonds, the amino acid mutations “LS” (M428L, N434S (EU numbering)/M_CH3.107_L/N_CH3.114_S (IMGT numbering for C-domain); Zalevsky et al., (2010) supra) and the “YTE” mutation (M252Y, S254T, T256E (EU Numbering)/M_CH2.15.1_Y/S_CH3.16_T/T_CH2.18_E (IMGT numbering for C-domain); Dall'acqua et al., (2002) supra), were required in the second half of the IgG1 Fc to restore binding to hFcRn. Fc domains comprised within SEQ ID NOs: 132, 134, 136, 138, 140, 142, 144, 154, 159, 160, 161, 162, 163 and 164 include the mutations S354C/S_CH3.10_C and T366W/T_CH3.22_W (EU/IMGT numbering for C-domain) to introduce a “knob”. Fc domains comprised within SEQ ID NOs: 133, 135, 137, 139, 141, 143, 145, 155, 156, 157 and 158 include the mutations Y349C/Y_CH3.5_C, T366S/T_CH3.22_S, L368A/L_CH3.24_S and Y407V/Y_CH3.86_V (EU/IMGT numbering for C-domain) to introduce a “hole”. Fc domains comprised within SEQ ID NOs: 154, 160 and 162 also include the LS mutation, and the Fc domain comprised within SEQ ID NO: 163 also includes the YTE mutation. Details of the complete mutations sets for the Fc domains comprising the “knob” mutations and additional mutations are shown in Table 30 below. Details of the complete mutations sets for the Fc domains comprising the “hole” mutations and additional mutations are shown in Table 31 below.

[0256] Important for the functioning of this “knob into hole” structure was that the “hole” mutations were made in the half of the Fc comprising the residues recruiting hFcαRI whereas the “knob” mutations were placed on the other half of the Fc. It was found that making the “knob” mutations in the half of the Fc recruiting hFcαRI lead to a high loss of affinity of the engineered IgG1 immunoglobulin for hFcαRI.

[0257] For the heterodimeric engineered IgG1 immunoglobulins comprising a first Fc domain with mutations to restore IgA effector function and a second Fc domain from IgG1, both Fc domains having “hole” and “knob” mutations respectively, as described in Example 1.3, full FcγR effector function was restored with the addition of the SDIE mutations. However, it was necessary to introduce the SDIE mutations into the Fc domain containing the “knob” mutation only, so as not to interfere with FcαRI binding. The Fc domains comprised within SEQ ID NOs: 161, 162 and 164 include the SDIE mutations as well as mutations to generate a “knob” for heterodimer stabilization. The Fc domain comprised within SEQ ID NO: 162 also includes the LS mutations to restore hFcRn binding. The generated heterodimeric formats are shown schematically in FIGS. 6a-e.

[0258] Binding of the engineered heterodimeric immunoglobulins to hFcαRI, hFcγRIa, hFcγRIIIa and hFcRn was characterized by surface plasmon resonance. The results are shown in Tables 32-36. The heterodimeric lead candidates (shown schematically in FIG. 6a and FIG. 6b) are listed in Table 37, and were tested in an in vitro ADCC and ADCP assay, as described in Examples 6 and 7, respectively. The results are shown in FIG. 17, FIG. 18 and FIG. 19. The resulting engineered immunoglobulins were constructed to achieve the following binding properties (see Table 37):
[0259] a. hFcαRI binding in a range from parental IgA2-like binding to about 10-fold lower than parental IgA2;
[0260] b. hFcαRI binding in a range from parental IgA2-like binding to about 10-fold lower, and wild-type IgG1-like binding towards hFcγ receptors;
[0261] c. hFcαRI binding in a range from parental IgA2-like binding to about 10-fold lower, and wild-type IgG1-like binding towards hFcRn; and
[0262] d. hFcαRI binding in a range from parental IgA2-like binding to about 10-fold lower, and wild-type IgG1-like binding towards hFcγRIa, hFcγRIIIa and hFcRn.

[0263] In an ADCP assay to assess phagocytosis, all heterodimeric candidates except for the SEQ ID NO: 137-154 pair, showed improved phagocytosis with increasing concentration compared to parental IgA2 (SEQ ID NO: 3) and wild-type IgG1 (SEQ ID NO: 1), as shown in FIG. 19.

TABLE 30
Summary of CH2 and CH3 mutations (based on sequence SEQ ID NO: 1)

| SEQ ID | |
|---|---|
| NO | CH2 and CH3 Mutation set ‘knob’ (IMGT numbering for C-domain) |
| 132 | CH2: A1.6#, P1.5#, E1.4#, L1.3#, L1.2C, G1.1C, G1H, S3R, P8R, K10A, P11L, K12E, |
| | T14L, M15.1L, 115.2#, S16G, R17S, T18E, P19A, E20N, V26T, D27G, V28L, S29R, |
| | H30D, N84.4C, S85.4G, T85.3C, R85.1S, T90P, V91G, L92C, H93A, D95P, L97N, N98H, |
| | K125# |
| | CH3: T6L, S10C, T22W, V25A, S35K, I37V, A38L, E40R, E42L, S43Q, N44G, G45S, |
| | P45.2E, E45.3L, N45.4P, A45.4RE, P82A, P83S, L85V, D92A, K93A, S94E, R95D, Q97K, |
| | Q98K, N100D, V101T, S105M, M107G, H113P, N114L, H115A, Y116F, L121I, L123R |
| 134 | CH2: A1.6#, P1.5#, E1.4#, L1.3#, L1.2C, G1.1C, G1H, S3R, P8R, K10A, P11L, K12E, |
| | T14L, M15.1L, 115.2#, S16G, R17S, T18E, P19A, E20N, V26T, D27G, V28L, S29R, |
| | H30D, N84.4C, S85.4G, T85.3C, R85.1S, T90P, V91G, L92C, H93A, D95P, L97N, N98H, |
| | K125# |
| | CH3: T6L, S10C, T22W, V25A, S35K, I37V, A38L, E40R, E42L, S43Q, N44G, G45S, |
| | P45.2E, E45.3L, N45.4P, A45.4RE, P82A, P83S, L85V, S105M, M107G, H113P, N114L, |
| | H115A, Y116F, L1211 |
| 136 | CH2: A1.6#, P1.5#, E1.4#, L1.3#, L1.2C, G1.1C, G1H, S3R, P8R, K10A, P11L, K12E, |
| | T14L, M15.1L, 115.2#, S16G, R17S, T18E, P19A, E20N, V26T, D27G, V28L, S29R, |
| | H30D, N84.4C, S85.4G, T85.3C, R85.1S, K125# |
| | CH3: T6L, S10C, T22W, V25A, S35K, I37V, A38L, E40R, E42L, S43Q, N44G, G45S, |
| | P45.2E, E45.3L, N45.4P, A45.4RE, P82A, P83S, L85V, D92A, K93A, S94E, R95D, Q97K, |
| | Q98K, N100D, V101T, S105M, M107G, H113P, N114L, H115A, Y116F, L121I, L123R |
| 138 | CH2: A1.6#, P1.5#, E1.4#, L1.3#, L1.2C, G1.1C, G1H, S3R, P8R, K10A, P11L, K12E, |
| | T14L, M15.1L, 115.2#, S16G, R17S, T18E, P19A, E20N, V26T, D27G, V28L, S29R, |
| | H30D, N84.4C, S85.4G, T85.3C, R85.1S, K125# |
| | CH3: T6L, S10C, T22W, V25A, S35K, I37V, A38L, E40R, E42L, S43Q, N44G, G45S, |
| | P45.2E, E45.3L, N45.4P, A45.4RE, P82A, P83S, L85V, S105M, M107G, H113P, N114L, |
| | H115A, Y116F, L1211 |
| 140 | CH2: A1.6#, P1.5#, E1.4#, L1.3#, L1.2C, G1.1C, G1H, S3R, P8R, K10A, P11L, K12E, |
| | T14L, M15.1L, 115.2#, S16G, R17S, T18E, P19A, E20N, V26T, D27G, V28L, S29R, |
| | H30D, N84.4C, S85.4G, T85.3C, R85.1S, T90P, V91G, L92C, H93A, D95P, L97N, N98H, |
| | K125# |
| | CH3: S10C, T22W, A45.4RE |
| 142 | CH2: A1.6#, P1.5#, E1.4#, L1.3#, L1.2C, G1.1C, G1H, S3R, P8R, K10A, P11L, K12E, |
| | T14L, M15.1L, 115.2#, S16G, R17S, T18E, P19A, E20N, V26T, D27G, V28L, S29R, |
| | H30D, N84.4C, S85.4G, T85.3C, R85.1S, K125# |
| | CH3: S10C, T22W, A45.4RE |
| 144 | CH2: A1.6#, P1.5#, E1.4#, L1.3#, L1.2C, G1.1C, G1H, S3R, V26T, D27G, V28L, S29R, |
| | H30D, N84.4C, S85.4G, T85.3C, R85.1S, K125# |
| | CH3: S10C, T22W, A45.4RE |
| 154 | CH2: A1.6#, P1.5#, E1.4#, L1.3#, L1.2C, G1.1C, G1H, S3R, V26T, D27G, V28L, S29R, |
| | H30D, N84.4C, S85.4G, T85.3C, R85.1S, K125# |
| | CH3: S10C, T22W, A45.4RE, M107L, N114S |
| 159 | CH2: K125# |
| | CH3: S10C, T22W, A45.4RE |
| 160 | CH2: K125# |
| | CH3: S10C, T22W, A45.4RE, M107L, N114S |
| 161 | CH2: S3D, H17E, K125# |
| | CH3: S10C, T22W, A45.4RE |
| 162 | CH2: S3D, H17E, K125# |
| | CH3: S10C, T22W, A45.4RE, M107L, N114S |
| 163 | CH2: A1.6#, P1.5#, E1.4#, L1.3#, L1.2C, G1.1C, G1H, S3R, M15.1Y, S16T, T18E, V26T, |
| | D27G, V28L, S29R, H30D, N84.4C, S85.4G, T85.3C, R85.1S, K125# |
| | CH3: S10C, T22W, A45.4RE |
| 164 | CH2: A1.3L, L1.2C, G1.1C, G1H, S3D, V26T, D27G, V28L, S29R, H30D, N84.4C, |
| | S85.4G, T85.3C, R85.1S, 1117E, K125# |
| | CH3: S10C, T22W, A45.4RE |

TABLE 31
Summary of CH2 and CH3 mutations (based on sequence SEQ ID NO: 1)

| SEQ ID | |
|---|---|
| NO | CH2 and CH3 Mutation set ‘hole’ (IMGT numbering for C-domain) |
| 133 | CH2: A1.6#, P1.5#, E1.4#, L1.3#, L1.2C, G1.1C, G1H, S3R, P8R, K10A, P11L, K12E, |
| | T14L, M15.1L, 115.2#, S16G, R17S, T18E, P19A, E20N, V26T, D27G, V28L, S29R, |
| | H30D, N84.4C, S85.4G, T85.3C, R85.1S, T90P, V91G, L92C, H93A, D95P, L97N, N98H, |
| | K125# |
| | CH3: T6L, T22S, L24A, V25A, S35K, I37V, A38L, E40R, E42L, S43Q, N44G, G45S, |
| | P45.2E, E45.3L, N45.4P, A45.4RE, P82A, P83S, L85V, Y86V, D92A, K93A, S94E, R95D, |
| | Q97K, Q98K, N100D, V101T, S105M, M107G, H113P, N114L, H115A, Y116F, L121I, |
| | L123R |
| 135 | CH2: A1.6#, P1.5#, E1.4#, L1.3#, L1.2C, G1.1C, G1H, S3R, P8R, K10A, P11L, K12E, |
| | T14L, M15.1L, 115.2#, S16G, R17S, T18E, P19A, E20N, V26T, D27G, V28L, S29R, |
| | H30D, N84.4C, S85.4G, T85.3C, R85.1S, T90P, V91G, L92C, H93A, D95P, L97N, N98H, |
| | K125# |
| | CH3: T6L, T22S, L24A, V25A, S35K, I37V, A38L, E40R, E42L, S43Q, N44G, G45S, |
| | P45.2E, E45.3L, N45.4P, A45.4RE, P82A, P83S, L85V, Y86V, S105M, M107G, H113P, |
| | N114L, H115A, Y116F, L1211 |
| 137 | CH2: A1.6#, P1.5#, E1.4#, L1.3#, L1.2C, G1.1C, G1H, S3R, P8R, K10A, P11L, K12E, |
| | T14L, M15.1L, 115.2#, S16G, R17S, T18E, P19A, E20N, V26T, D27G, V28L, S29R, |
| | H30D, N84.4C, S85.4G, T85.3C, R85.1S, K125# |
| | CH3: T6L, T22S, L24A, V25A, S35K, I37V, A38L, E40R, E42L, S43Q, N44G, G45S, |
| | P45.2E, E45.3L, N45.4P, A45.4RE, P82A, P83S, L85V, Y86V, D92A, K93A, S94E, R95D, |
| | Q97K, Q98K, N100D, V101T, S105M, M107G, H113P, N114L, H115A, Y116F, L121I, |
| | L123R |
| 139 | CH2: A1.6#, P1.5#, E1.4#, L1.3#, L1.2C, G1.1C, G1H, S3R, P8R, K10A, P11L, K12E, |
| | T14L, M15.1L, 115.2#, S16G, R17S, T18E, P19A, E20N, V26T, D27G, V28L, S29R, |
| | H30D, N84.4C, S85.4G, T85.3C, R85.1S, K125# |
| | CH3: T6L, T22S, L24A, V25A, S35K, I37V, A38L, E40R, E42L, S43Q, N44G, G45S, |
| | P45.2E, E45.3L, N45.4P, A45.4RE, P82A, P83S, L85V, Y86V, S105M, M107G, H113P, |
| | N114L, H115A, Y116F, L1211 |
| 141 | CH2: A1.6#, P1.5#, E1.4#, L1.3#, L1.2C, G1.1C, G1H, S3R, P8R, K10A, P11L, K12E, |
| | T14L, M15.1L, 115.2#, S16G, R17S, T18E, P19A, E20N, V26T, D27G, V28L, S29R, |
| | H30D, N84.4C, S85.4G, T85.3C, R85.1S, T90P, V91G, L92C, H93A, D95P, L97N, N98H, |
| | K125# |
| | CH3: T22S, L24A |
| 143 | CH2: A1.6#, P1.5#, E1.4#, L1.3#, L1.2C, G1.1C, G1H, S3R, P8R, K10A, P11L, K12E, |
| | T14L, M15.1L, 115.2#, S16G, R17S, T18E, P19A, E20N, V26T, D27G, V28L, S29R, |
| | H30D, N84.4C, S85.4G, T85.3C, R85.1S, K125# |
| | CH3: T22S, L24A |
| 145 | CH2: A1.6#, P1.5#, E1.4#, L1.3#, L1.2C, G1.1C, G1H, S3R, V26T, D27G, V28L, S29R, |
| | H30D, N84.4C, S85.4G, T85.3C, R85.1S, K125# |
| | CH3: T22S, L24A |
| 155 | CH2: P8R, K10A, P11L, K12E, T14L, M15.1L, 115.2#, S16G, R17S, T18E, P19A, E2ON, |
| | T90P, V91G, L92C, H93A, D95P, L97N, N98H, K125# |
| | CH3: T6L, T22S, L24A, V25A, S35K, I37V, A38L, E40R, E42L, S43Q, N44G, G45S, |
| | P45.2E, E45.3L, N45.4P, A45.4RE, P82A, P83S, L85V, Y86V, D92A, K93A, S94E, R95D, |
| | Q97K, Q98K, N100D, V101T, S105M, M107G, H113P, N114L, H115A, Y116F, L121I, |
| | L123R |
| 156 | CH2: P8R, K10A, P11L, K12E, T14L, M15.1L, 115.2#, S16G, R17S, T18E, P19A, E2ON, |
| | T90P, V91G, L92C, H93A, D95P, L97N, N98H, K125# |
| | CH3: T6L, T22S, L24A, V25A, S35K, I37V, A38L, E40R, E42L, S43Q, N44G, G45S, |
| | P45.2E, E45.3L, N45.4P, A45.4RE, P82A, P83S, L85V, Y86V, S105M, M107G, H113P, |
| | N114L, H115A, Y116F, L1211 |
| 157 | CH2: P8R, K10A, P11L, K12E, T14L, M15.1L, 115.2#, S16G, R17S, T18E, P19A, E2ON, |
| | K125# |
| | CH3: T6L, T22S, L24A, V25A, S35K, I37V, A38L, E40R, E42L, S43Q, N44G, G45S, |
| | P45.2E, E45.3L, N45.4P, A45.4RE, P82A, P83S, L85V, Y86V, D92A, K93A, S94E, R95D, |
| | Q97K, Q98K, N100D, V101T, S105M, M107G, H113P, N114L, H115A, Y116F, L121I, |
| | L123R |
| 158 | CH2: P8R, K10A, P11L, K12E, T14L, M15.1L, 115.2#, S16G, R17S, T18E, P19A, E20N, |
| | K125# |
| | CH3: T6L, T22S, L24A, V25A, S35K, I37V, A38L, E40R, E42L, S43Q, N44G, G45S, |
| | P45.2E, E45.3L, N45.4P, A45.4RE, P82A, P83S, L85V, Y86V, S105M, M107G, H113P, |
| | N114L, H115A, Y116F, L1211 |

TABLE 32
Affinity and maximum response of engineered immunoglobulins
toward hFcαRI determined by SPR experiment, following procedure
described in Example 5b.

| | | | Monovalent maximum |
|---|---|---|---|
| | | KD (1:1) | response at 1000 nM |
| SEQ ID NO | Ref number | (M) | hFcαRI (RU) |
| 3 | 2737 | 5.20E−07 | 168 |
| 119 | 2768 | 5.79E−07 | 133 |
| 120 | 2769 | 9.73E−07 | 95 |
| 122 | 2771 | 9.24E−07 | 122 |
| 123 | 2772 | 1.19E−06 | 88 |
| 132-141 | 2840-2851 | 3.34E−06 | 38 |
| 136-143 | 2841-2852 | 3.05E−07 | 68 |
| 134-141 | 2842-2851 | 4.82E−07 | 34 |
| 138-143 | 2843-2852 | 1.85E−06 | 33 |
| 132-145 | 2840-2853 | 8.57E−07 | 48 |
| 136-145 | 2841-2853 | 1.29E−06 | 34 |
| 134-145 | 2842-2853 | 2.01E−06 | 28 |
| 138-145 | 2843-2853 | 8.50E−07 | 28 |
| 133-140 | 3090-2844 | 7.01E−07 | 45 |
| 137-142 | 3092-2845 | 1.16E−06 | 57 |
| 135-140 | 3091-2844 | 7.60E−07 | 40 |
| 139-142 | 3093-2845 | 1.09E−06 | 49 |
| 133-144 | 3090-2846 | 9.19E−07 | 45 |
| 137-144 | 3092-2846 | 1.05E−06 | 56 |
| 135-144 | 3091-2846 | 9.17E−07 | 46 |
| 139-144 | 3093-2846 | 1.82E−06 | 31 |
| 137-163 | 3011-3092 | 4.36E−07 | 59 |
| 133-154 | 3090-3094 | 2.32E−07 | 64 |
| 135-154 | 3091-3094 | 2.90E−07 | 61 |
| 137-154 | 3092-3094 | 3.78E−07 | 77 |
| 139-154 | 3093-3094 | 4.53E−07 | 75 |
| 155-159 | 3095-3099 | 4.27E−07 | 63 |
| 156-159 | 3096-3099 | 5.00E−07 | 52 |
| 157-159 | 3097-3099 | 4.63E−07 | 86 |
| 158-159 | 3098-3099 | 6.07E−07 | 72 |
| 155-160 | 3095-3100 | 3.86E−07 | 67 |
| 156-160 | 3096-3100 | 4.61E−07 | 63 |
| 157-160 | 3097-3100 | 6.62E−07 | 83 |
| 158-160 | 3098-3100 | 6.99E−07 | 68 |
| 157-161 | 3097-3101 | 5.25E−07 | 70 |
| 158-161 | 3098-3101 | 7.45E−07 | 66 |
| 157-162 | 3097-3102 | 6.90E−07 | 66 |
| 158-162 | 3098-3102 | 8.56E−07 | 64 |

TABLE 33
Affinity and maximum response of engineered immunoglobulins
toward hFcγRIa determined by SPR experiment, following procedure
described in Example 5b.

| | | | Maximum response at |
|---|---|---|---|
| SEQ ID NO | Ref number | KD (1:1) (M) | 1000 nM hFcγRIa (RU) |
| 1 | 2257 | 3.50E−11 | 208 |
| 3 | 2737 | 0.00E+00 | 0 |
| 122 | 2771 | 0.00E+00 | 0 |
| 137-163 | 3011-3092 | 0.00E+00 | 0 |
| 133-154 | 3090-3094 | 0.00E+00 | 0 |
| 135-154 | 3091-3094 | 0.00E+00 | 0 |
| 137-154 | 3092-3094 | 0.00E+00 | 0 |
| 139-154 | 3093-3094 | 0.00E+00 | 0 |
| 155-159 | 3095-3099 | 6.32E−10 | 126 |
| 156-159 | 3096-3099 | 5.87E−10 | 110 |
| 157-159 | 3097-3099 | 7.37E−10 | 178 |
| 158-159 | 3098-3099 | 7.72E−10 | 182 |
| 155-160 | 3095-3100 | 1.54E−09 | 83 |
| 156-160 | 3096-3100 | 1.77E−09 | 80 |
| 157-160 | 3097-3100 | 1.91E−09 | 98 |
| 158-160 | 3098-3100 | 1.81E−09 | 92 |
| 157-161 | 3097-3101 | 5.55E−11 | 373 |
| 158-161 | 3098-3101 | 4.65E−11 | 417 |
| 155-162 | 3095-3102 | 1.25E−08 | 341 |
| 157-162 | 3097-3102 | 8.75E−10 | 150 |
| 158-162 | 3098-3102 | 7.85E−10 | 157 |

TABLE 34
Maximum response of engineered immunoglobulins toward hFcγRIIIa
determined by SPR experiment, following procedure described in
Example 5b. Maximum response only was determined to drive
selection and speed up screening.

| | | | Maximum response |
|---|---|---|---|
| | | | at 500 nM hFcγRIIIa |
| SEQ ID NO | Ref number | KD (1:1) (M) | (RU) |
| 1 | 2257 | ND | 164 |
| 3 | 2737 | ND | 0 |
| 133-154 | 3090-3094 | ND | 0 |
| 135-154 | 3091-3094 | ND | 0 |
| 137-154 | 3092-3094 | ND | 0 |
| 139-154 | 3093-3094 | ND | 0 |
| 155-159 | 3095-3099 | ND | 15 |
| 156-159 | 3096-3099 | ND | 13 |
| 157-159 | 3097-3099 | ND | 28 |
| 158-159 | 3098-3099 | ND | 25 |
| 155-160 | 3095-3100 | ND | 0 |
| 156-160 | 3096-3100 | ND | 0 |
| 157-160 | 3097-3100 | ND | 0 |
| 158-160 | 3098-3100 | ND | 0 |
| 155-161 | 3095-3101 | ND | ND |
| 156-161 | 3096-3101 | ND | ND |
| 157-161 | 3097-3101 | ND | 53 |
| 158-161 | 3098-3101 | ND | 51 |
| 155-162 | 3095-3102 | ND | ND |
| 156-162 | 3096-3102 | ND | ND |
| 157-162 | 3097-3102 | ND | 16 |
| 158-162 | 3098-3102 | ND | 10 |

TABLE 35
Maximum response of engineered immunoglobulins toward hFcRn
determined by SPR experiment, following procedure described in
Example 5b. Maximum response only was determined
to drive selection and speed up screening.

| | | | Maximum response |
|---|---|---|---|
| | | KD (1:1) | at 2500 nM hFcRn |
| SEQ ID NO | Ref number | (M) | (RU) |
| 1 | 2257 | ND | 177 |
| 132-141 | 2840-2851 | ND | 0 |
| 136-143 | 2841-2852 | ND | 0 |
| 134-141 | 2842-2851 | ND | 0 |
| 138-143 | 2843-2852 | ND | 0 |
| 132-145 | 2840-2853 | ND | 22 |
| 136-145 | 2841-2853 | ND | 24 |
| 134-145 | 2842-2853 | ND | 21 |
| 138-145 | 2843-2853 | ND | 28 |
| 133-140 | 3090-2844 | ND | 0 |
| 137-142 | 3092-2845 | ND | 0 |
| 135-140 | 3091-2844 | ND | 0 |
| 139-142 | 3093-2845 | ND | 0 |
| 133-144 | 3090-2846 | ND | 13 |
| 137-144 | 3092-2846 | ND | 23 |
| 135-144 | 3091-2846 | ND | 15 |
| 139-144 | 3093-2846 | ND | 22 |

TABLE 36
Affinity and maximum response of engineered immunoglobulins
toward hFcRn determined by SPR experiment, following
procedure described in Example 5b.

| | | | Maximum response |
|---|---|---|---|
| | | | at 5000nM hFcRn |
| SEQ ID NO | Ref number | KD (1:1) (M) | (RU) |
| 1 | 2257 | 3.00E−07 | 332 |
| 136-145 | 2841-2853 | 1.51E−06 | 47 |
| 133-144 | 3090-2846 | 2.58E−08 | 14 |
| 137-144 | 3092-2846 | 1.39E−07 | 34 |
| 135-144 | 3091-2846 | 1.83E−06 | 33 |
| 139-144 | 3093-2846 | 1.79E−07 | 31 |
| 137-163 | 3011-3092 | 4.87E−07 | 83 |
| 137-154 | 3092-3094 | 2.19E−07 | 97 |
| 157-159 | 3097-3099 | 1.42E−07 | 131 |
| 157-160 | 3097-3100 | 5.37E−08 | 76 |
| 157-161 | 3097-3101 | 1.63E−07 | 101 |
| 157-162 | 3097-3102 | 9.76E−08 | 90 |

### SUMMARY

[0264] The protein engineering campaign described in Examples 1 and 2 led to the generation of engineered IgG1 immunoglobulins having both alpha and gamma effector function. These engineered immunoglobulins could be constructed with or without hFcRn binding for half-life extension and the binding properties and cellular effector function of the lead candidates are shown in Table 37.

TABLE 37
Lead candidates selected through engineering campaign described in Examples 1
and 2, and description of their ability to mediate alpha and gamma effector functions.

| | | SPR data | | | | Cellular effector function | | |
|---|---|---|---|---|---|---|---|---|
| | | Binding to | Binding to | Binding to | Binding | PMN | PBMC | |
| SEQ ID NO | Ref number | FcαRI | FegRIa | FcgRIIIa | to FeRn | ADCC | ADCC | ADCP |
| 1 | 2257 | | + | + | + | | + | + |
| 3 | 2737 | + | | | | + | | + |
| 122 | 2771 | + | | | | + | | + |
| 148 | 3084 | + | + | + | | + | | + |
| 152 | 3088 | + | + | + | | + | + | + |
| 137-154 | 3092-3094 | + | | | + | + | | + |
| 157-159 | 3097-3099 | + | + | + | + | + | | + |
| 157-160 | 3097-3100 | + | + | | + | + | | + |
| 157-161 | 3097-3101 | + | + | + | + | + | + | + |
| 157-162 | 3097-3102 | + | + | + | + | + | + | + |

### Example 3: IgA2 Fc Affinity Maturation for hFcαRI

[0265] 3.1 IgA2 Fc Library Design

[0266] In-silico analysis was performed on the IgA1 Fc/hFcαRI complex using the crystal structure PDB 1OWO, since IgA1 has a similar structure to IgA2, differing only in the hinge region. All residues located in proximity to hFcαRI were considered to be potentially involved in the IgA1 Fc/hFcαRI interaction and were classified into two categories: (i) residues from the “core” interface region (LCH2.15, LCH2.15.1, MCH3.105, ECH3.109, PCH3.113, LCH3.114, ACH3.115, FCH3.116, QCH3.118, using IMGT numbering for C-domain) and (ii) residues from the “shell” region surrounding the core (QCH2.94, NCH2.97, HCH2.98, RCH3.1, ECH3.3, RCH3.40, LCH3.42, SCH3.45, ECH3.45.2, using IMGT numbering for C-domain). Both groups of residues were diversified using a trinucleotide-directed mutagenesis (TRIM) based approach (Virnekäs et al, (1994) Nucleic Acids Res., 22: 5600-5607; Knappik et al., (2000) J Mol Biol., 296: 57-86) to generate two libraries L1 and L2, corresponding to the ‘shell’ region and the ‘core’ region, respectively.

[0267] A third library was generated using error prone PCR of the IgA2 Fc domain (EP library) (Gram et al., (1992) PNAS USA, 89: 3576-3580).

[0268] 3.2 Library Screening by Yeast Display

[0269] All three IgA2 Fc libraries were screened using yeast display technology (Boder et al., (1997) Nature Biot., 15: 553-557). Briefly, IgA Fcs were displayed on yeast cell membranes via the α-agglutinin (Aga1/Aga2) protein heterodimer, with IgA2 Fc fused to the N-terminus of the Aga2 protein. Four rounds of sorting were performed:

[0270] During the first round of sorting, all three libraries were grown for two days at 20° C. with shaking in selective medium containing 1% raffinose and 2% galactose to induce IgA2 Fc expression on yeast cell surface. Each culture was pelleted, the supernatant removed, and the pellet washed once with PBSM (PBS (Gibco, Waltham, Mass.) with 1% BSA (bovine serum albumin) and 2 mM EDTA. After resuspension of pellets in 20 ml PBSM, 100 μl each streptavidin and anti-biotin microbeads (Miltenyi Biotec, Bergisch Gladbach, Germany) were added. Cells were incubated for 1 hr at room temperature with rotation. The beads were then removed using a MACS LS column (Miltenyi). The libraries were then pelleted and resuspended in 20 ml PBSM+50 nM biotinylated FcαRI (CD89) (SEQ ID NO: 253) and incubated for 1 hr at room temperature with rotation. The cells were then pelleted, the supernatant removed, washed once in PBSM, then resuspended in 20 ml PBSM+100 μl streptavidin microspheres (Miltenyi). The libraries were incubated for 5 min on ice with occasional shaking, then the cells were pelleted, the supernatant removed, resuspended in 20 ml PBSM, then separated on MACS LS columns (Miltenyi). The columns were washed once with 5 ml PBSM, then the bound cells were eluted with selective medium, brought to 10 ml final in selective medium, and grown at 30° C. with shaking overnight.

[0271] (ii) For the second round of sorting, the first round output from each of the three libraries was grown 24 hrs at 20° C. in selective medium containing 1% raffinose and 2% galactose to induce IgA expression. The libraries were pelleted, washed once in PBSF (PBS (Gibco)+0.1% bovine serum albumin), and resuspended in PBSF. Each library was divided in to two samples; the first sample was brought to 25 nM biotinylated FcαRI in PBSF, and the second sample was brought to 10 nM biotinylated FcαRI in PBSF. To each, rabbit anti myc-tag Dylight 488 (Rockland, Limerick, Pa.) was added ata 1:100 final dilution, and the samples were incubated for 1.5 hrs at room temperature with rotation. The samples were pelleted, washed once with PBSF, then incubated with PBSF+1:100 final streptavidin Dylight 633 (Invitrogen, Waltham, Mass.) for 5 min with rotation. The samples were then pelleted, washed once, resuspended in PBSF, filtered through a 40 μm strainer, then analyzed and sorted using flow cytometry on a FACS Aria cell sorter (Becton Dickinson Biosciences, San Jose, Calif.). For the L1 and L2 libraries, the 10 nM FcαRI sample was sorted, and for the EP library, the 25 nM FcαRI sample was sorted. In each case, the yeast showing the top 1-2% of signal were gated, collected, and grown overnight at 30° C. in selective medium.

[0272] (iii) For the third round of sorting, the cultures from the second round of sorting were inoculated in to selective medium+1% raffinose+2% galactose, and grown overnight at 20° to induce IgA expression. Cells from each of the three libraries were prepared and sorted as was done in the second round, except with the use of chicken anti myc tag FITC (Genetex, Irvine, Calif.) and Neutravidin Dylight 633 (Invitrogen), as detection reagents. Biotinylated FcαRI was used at 5 nM for the EP library, 2 nM for the L1 library, and 1 nM for the L2 library. In each case, the yeast showing the top 1-2% of signal were gated, collected, and grown overnight at 30° C. in selective medium.

[0273] (iv) The fourth round of sorting was completed on the EP and L1 libraries only. The cultures from the third round of sorting were inoculated in to selective medium+1% raffinose+2% galactose, and grown overnight at 20° to induce IgA expression. Cells from each of the libraries were prepared and sorted as was done in the second round, except with the use of mouse anti c myc Dylight 488 (Invitrogen) and Streptavidin cy5 (Invitrogen), as detection reagents. Biotinylated FcαRI was used at 2 nM for the EP library, and 1 nM for the L1 library. In each case, the yeast showing the top 1-2% of signal were gated, collected, and grown overnight at 30° C. in selective medium.

[0274] 3.3 Hot Spot Identification and Translation in Full-Length Immunoglobulins

[0275] Plasmids were purified from the third (L2 library) and fourth (EP and L1 libraries) round cultures, transformed in to E. coli, plated on selective agar plates, grown overnight at 37°, and submitted to Genewiz (South Plainfield, N.J.) for Sanger sequencing (Sanger et al (1975) J Mol Biol., 94(3): 441-8; Sanger et al (1977) PNAS USA., 74(12): 5463-7). The top clones were selected based on their frequency of appearance and were used to identify mutations enhancing the IgA2/FcαRI interaction. The IgA2 residue positions are presented Table 38.

TABLE 38
Mutations determined by yeast display for enhancing IgA2
affinity towards hFcαRI.

| IgA2 sequence position (IMGT | Initial residue | |
|---|---|---|
| numbering for C-domain) | in IgA2 | Mutation |
| CH2.10 | A | S |
| CH2.89 | L | I |
| CH2.91 | G | V |
| CH2.94 | Q | E |
| CH2.97 | N | Y, H |
| CH2.99 | G | W |
| CH3.105 | M | Y |
| CH3.109 | E | D |
| CH3.118 | Q | Y |
| CH3.124 | L | F |

[0276] Identified mutations were incorporated into the full-length IgA2 immunoglobulin having SEQ ID NO: 3 (FIG. 7a), as single point mutation or in combination, and expressed transiently in HEK293 cells (as described in Example 4). The same mutations were also incorporated into IgG1 isotype immunoglobulins having SEQ ID NOs: 122 and 148 and containing an engineered IgG Fc that was capable of binding to hFcαRI (FIG. 7b and FIG. 7c, respectively). The tested mutation sets are presented in Table 39 (based on SEQ ID NO: 3), Table 41 (based on SEQ ID NO: 122) and Table 43 (based on SEQ ID NO: 148).

[0277] The Fc variants were purified and assessed using surface plasmon resonance (SPR), measured against hFcαRI, to evaluate the effect of specific mutations on immunoglobulin affinity to hFcαRI. Interestingly, all mutations had a limited effect or no real effect on expression yield and aggregation propensity of the respective immunoglobulin. SPR data and aggregation content after capture are shown in Table 40, Table 42 and Table 44.

[0278] Finally, lead candidates were selected based on SPR and aggregation data and SPR experiments were repeated using a broader range of hFcαRI concentrations. The use of the adapted concentration range enabled a more precise measurement of the interaction between engineered immunoglobulin and hFcαRI. Results are shown in Table 45, Table 46 and Table 47.

TABLE 39
Tested mutation sets, based on parental IgA2 immunoglobulin SEQ ID 3.

| SEQ | Ref | |
|---|---|---|
| ID NO | number | Mutation set |
| 3 | 2737 | — |
| 182 | 3240 | Q_CH2.94_E |
| 183 | 3241 | N_CH2.97_Y |
| 184 | 3242 | S_CH3.45_D |
| 185 | 3243 | M_CH3.105_Y |
| 186 | 3244 | Q_CH3.118_Y |
| 187 | 3245 | Q_CH2.94_E, N_CH2.97_Y |
| 225 | 3309 | Q_CH2.94_E, S_CH3.45_D |
| 226 | 3310 | Q_CH2.94_E, M_CH3.105_Y |
| 227 | 3311 | N_CH2.97_Y, S_CH3.45_D |
| 228 | 3312 | N_CH2.97_Y, M_CH3.105_Y |
| 229 | 3313 | S_CH3.45_D, M_CH3.105_Y |
| 200 | 3258 | M_CH3.105_Y, Q_CH3.118_Y |
| 230 | 3314 | Q_CH2.94_E, N_CH2.97_Y, M_CH3.105_Y |
| 231 | 3315 | N_CH2.97_Y, S_CH3.45_D, M_CH3.105_Y |
| 232 | 3316 | Q_CH2.94_E, S_CH3.45_D, M_CH3.105_Y |
| 201 | 3259 | M_CH3.105_Y, Q_CH3.118_Y, S_CH3.45_D |
| 202 | 3260 | Q_CH2.94_E, N_CH2.97_Y, S_CH3.45_D |
| 233 | 3317 | Q_CH2.94_E, N_CH2.97_Y, S_CH3.45_D, M_CH3.105_Y |
| 203 | 3261 | Q_CH2.94_E, N_CH2.97_Y, M_CH3.105_Y, Q_CH3.118_Y |
| 204 | 3262 | Q_CH2.94_E, N_CH2.97_Y, S_CH3.45_D, M_CH3.105_Y, Q_CH3.118_Y |
| 215 | 3273 | A_CH2.10_S |
| 216 | 3274 | L_CH2.89_I |
| 217 | 3275 | G_CH2.91_V |
| 222 | 3280 | N_CH2.97_H |
| 218 | 3276 | G_CH2.99_W |
| 219 | 3277 | E_CH3.109_D |
| 220 | 3278 | L_CH3.124_F |
| 221 | 3279 | L_CH2.89_I, G_CH2.91_V, Q_CH2.94_E, N_CH2.97_Y, G_CH2.99_W |

TABLE 40
Biophysical characterization of the Fc variants based on parental
IgA2 SEQ ID No: 3.

| | | | Maximum response¹ | |
|---|---|---|---|---|
| SEQ ID | Ref | KD (1:1) | at 1000 nM | Aggregation² |
| NO | number | (M)¹ | hFCaRI (RU) | (%) |
| 3 | 2737 | 5.20E−07 | 168 | 11.5 |
| 182 | 3240 | 1.26E−07 | 253 | 12.40 |
| 183 | 3241 | 8.69E−08 | 235 | 10.60 |
| 184 | 3242 | 6.67E−08 | 261 | 9.93 |
| 185 | 3243 | 2.63E−08 | 278 | 11.30 |
| 186 | 3244 | 1.46E−07 | 194 | 8.60 |
| 187 | 3245 | 6.73E−08 | 250 | 14.00 |
| 225 | 3309 | 5.20E−08 | 242 | 8.30 |
| 226 | 3310 | 1.70E−08 | 213 | 8.10 |
| 227 | 3311 | 1.94E−08 | 246 | 9.60 |
| 228 | 3312 | 6.77E−09 | 251 | 7.50 |
| 229 | 3313 | 9.81E−09 | 194 | 8.90 |
| 200 | 3258 | 1.30E−08 | 278 | 10.20 |
| 230 | 3314 | 5.65E−09 | 247 | 8.40 |
| 231 | 3315 | 3.96E−09 | 223 | 9.90 |
| 232 | 3316 | 9.80E−09 | 226 | 7.40 |
| 201 | 3259 | 7.43E−09 | 289 | 10.40 |
| 202 | 3260 | 4.10E−08 | 306 | 13.10 |
| 233 | 3317 | 3.81E−09 | 244 | 11.90 |
| 203 | 3261 | 5.66E−09 | 289 | 13.60 |
| 204 | 3262 | 5.99E−09 | 294 | 16.70 |
| 215 | 3273 | 1.09E−07 | 244 | 13.50 |
| 216 | 3274 | 1.24E−07 | 189 | 11.00 |
| 217 | 3275 | 1.38E−07 | 247 | 10.30 |
| 222 | 3280 | 1.00E−07 | 188 | nd |
| 218 | 3276 | 1.43E−07 | 225 | 9.90 |
| 219 | 3277 | 9.20E−08 | 220 | 11.40 |
| 220 | 3278 | 1.60E−07 | 231 | 12.80 |
| 221 | 3279 | nd | nd | nd |

¹ Affinity and maximum response of engineered immunoglobulins towards hFcαRI were determined by SPR experiments, following the procedure described in Example 5b.
² Aggregation propensity was measured following the procedure described in Example 4.
nd: not determined

TABLE 41
Tested mutation sets, based on parental

| | | IgG1 engineered immunoglobulin SEQ ID 122. |
|---|---|---|
| SEQ | Ref | |
| ID NO | number | Mutation set |
| 122 | 2771 | — |
| 188 | 3246 | Q_CH2.94_E |
| 189 | 3247 | L_CH2.97_Y |
| 190 | 3248 | S_CH3.45_D |
| 191 | 3249 | M_CH3.105_Y |
| 192 | 3250 | Q_CH3.118_Y |
| 193 | 3251 | Q_CH2.94_E, L_CH2.97_Y |
| 234 | 3318 | Q_CH2.94_E, S_CH3.45_D |
| 235 | 3319 | Q_CH2.94_E, M_CH3.105_Y |
| 236 | 3320 | L_CH2.97_Y, S_CH3.45_D |
| 237 | 3321 | L_CH2.97_Y, M_CH3.105_Y |
| 238 | 3322 | S_CH3.45_D, M_CH3.105_Y |
| 205 | 3263 | M_CH3.105_Y, Q_CH3.118_Y |
| 239 | 3323 | Q_CH2.94_E, L_CH2.97_Y, M_CH3.105_Y |
| 240 | 3324 | L_CH2.97_Y, S_CH3.45_D, M_CH3.105_Y |
| 241 | 3325 | Q_CH2.94_E, S_CH3.45_D, M_CH3.105_Y |
| 206 | 3264 | M_CH3.105_Y, Q_CH3.118_Y, S_CH3.45_D |
| 207 | 3265 | Q_CH2.94_E, L_CH2.97_Y, S_CH3.45_D |
| 242 | 3326 | Q_CH2.94_E, L_CH2.97_Y, S_CH3.45_D, M_CH3.105_Y |
| 208 | 3266 | Q_CH2.94_E, L_CH2.97_Y, M_CH3.105_Y, Q_CH3.118_Y |
| 209 | 3267 | Q_CH2.94_E, L_CH2.97_Y, S_CH3.45_D, M_CH3.105_Y, Q_CH3.118_Y |
| 223 | 3281 | L_CH2.89_I, V_CH2.91, Q_CH2.94_E, L_CH2.97_Y, G_CH2.99_W |

TABLE 42
Biophysical characterization of Fc variants based on parental engineered
immunoglobulin SEQ ID NO: 122

| | | | Maximum response¹ | |
|---|---|---|---|---|
| SEQ ID | Ref | KD (1:1) | at 1000 nM hFcαRI | |
| NO | number | (M)1 | (RU) | Aggregation² (%) |
| 3 | 2737 | 5.20E−07 | 168 | 11.5 |
| 122 | 2771 | 2.70E−07 | 197 | 9.20 |
| 188 | 3246 | 8.72E−08 | 267 | 14.80 |
| 189 | 3247 | 1.45E−08 | 372 | 12.00 |
| 190 | 3248 | 5.75E−08 | 344 | 9.80 |
| 191 | 3249 | 2.06E−08 | 339 | 6.80 |
| 192 | 3250 | 1.04E−07 | 240 | 10.00 |
| 193 | 3251 | 1.22E−08 | 344 | 9.00 |
| 234 | 3318 | 4.38E−08 | 342 | 10.10 |
| 235 | 3319 | 1.51E−08 | 352 | 9.40 |
| 236 | 3320 | 4.81E−09 | 326 | 7.90 |
| 237 | 3321 | 1.64E−09 | 289 | 8.30 |
| 238 | 3322 | 1.00E−08 | 327 | 8.70 |
| 205 | 3263 | 9.56E−09 | 322 | 12.70 |
| 239 | 3323 | 9.56E−10 | 319 | 9.00 |
| 240 | 3324 | 7.81E−10 | 304 | 7.50 |
| 241 | 3325 | 8.47E−09 | 325 | 7.80 |
| 206 | 3264 | 3.81E−09 | 289 | 11.40 |
| 207 | 3265 | 5.02E−09 | 278 | 13.90 |
| 242 | 3326 | 5.84E−10 | 307 | 8.50 |
| 208 | 3266 | 5.57E−10 | 333 | 12.05 |
| 209 | 3267 | 3.84E−10 | 305 | 13.70 |
| 223 | 3281 | 1.87E−08 | 228 | nd |

¹ Affinity and maximum response of engineered immunoglobulins toward hFcαRI were determined by SPR experiment, following the procedure described in Example 5b.
² Aggregation propensity was measured following the procedure described in Example 4.
nd: not determined

TABLE 43
Tested mutation sets, based on parental
IgG1 engineered immunoglobulin SEQ ID 148

| SEQ | Ref | |
|---|---|---|
| ID NO | number | Mutation set |
| 148 | 3084 | — |
| 194 | 3252 | Q_CH2.94_E |
| 195 | 3253 | L_CH2.97_Y |
| 196 | 3254 | S_CH3.45_D |
| 197 | 3255 | M_CH3.105_Y |
| 198 | 3256 | Q_CH3.118_Y |
| 199 | 3257 | Q_CH2.94_E, L_CH2.97_Y |
| 243 | 3327 | Q_CH2.94_E, S_CH3.45_D |
| 244 | 3328 | Q_CH2.94_E, M_CH3.105_Y |
| 245 | 3329 | L_CH2.97_Y, S_CH3.45_D |
| 246 | 3330 | L_CH2.97_Y, M_CH3.105_Y |
| 247 | 3331 | S_CH3.45_D, M_CH3.105_Y |
| 210 | 3268 | M_CH3.105_Y, Q_CH3.118_Y |
| 248 | 3332 | Q_CH2.94_E, L_CH2.97_Y, M_CH3.105_Y |
| 249 | 3333 | L_CH2.97_Y, S_CH3.45_D, M_CH3.105_Y |
| 250 | 3334 | Q_CH2.94_E, S_CH3.45_D, M_CH3.105_Y |
| 211 | 3269 | M_CH3.105_Y, Q_CH3.118_Y, S_CH3.45_D |
| 212 | 3270 | Q_CH2.94_E, L_CH2.97_Y, S_CH3.45_D |
| 251 | 3335 | Q_CH2.94_E, L_CH2.97_Y, S_CH3.45_D, M_CH3.105_Y |
| 213 | 3271 | Q_CH2.94_E, L_CH2.97_Y, M_CH3.105_Y, Q_CH3.118_Y |
| 214 | 3272 | Q_CH2.94_E, L_CH2.97_Y, S_CH3.45_D, M_CH3.105_Y, Q_CH3.118_Y |
| 224 | 3282 | L_CH2.89_I, V_CH2.91, Q_CH2.94_E, L_CH2.97_Y, G_CH2.99_W |

TABLE 44
Biophysical characterization of Fc variants based on parental engineered
immunoglobulin SEQ ID NO: 148

| | | | Maximum response¹ | |
|---|---|---|---|---|
| SEQ ID | Ref | KD (1:1) | at1000nM hFcαRI | |
| NO | number | (M)¹ | (RU) | Aggregation² (%) |
| 3 | 2737 | 5.20E−07 | 168 | 11.5 |
| 148 | 3084 | 5.09E−07 | 146 | 10.30 |
| 194 | 3252 | 1.15E−07 | 212 | 9.20 |
| 195 | 3253 | 3.52E−08 | 359 | 11.30 |
| 196 | 3254 | 1.32E−07 | 276 | 12.00 |
| 197 | 3255 | 5.38E−08 | 300 | 13.90 |
| 198 | 3256 | 1.33E−07 | 194 | 11.70 |
| 199 | 3257 | 2.77E−08 | 376 | 9.80 |
| 243 | 3327 | 7.53E−08 | 303 | 9.30 |
| 244 | 3328 | 3.88E−08 | 342 | 8.70 |
| 245 | 3329 | 1.12E−08 | 369 | 12.70 |
| 246 | 3330 | 4.32E−09 | 275 | 13.80 |
| 247 | 3331 | 2.80E−08 | 342 | 14.60 |
| 210 | 3268 | 2.29E−08 | 341 | 13.60 |
| 248 | 3332 | 2.39E−09 | 294 | 11.70 |
| 249 | 3333 | 1.96E−09 | 238 | 9.10 |
| 250 | 3334 | 2.23E−08 | 353 | 7.50 |
| 211 | 3269 | 1.05E−08 | 353 | 12.00 |
| 212 | 3270 | 1.04E−08 | 365 | 11.70 |
| 251 | 3335 | 1.27E−09 | 282 | 8.30 |
| 213 | 3271 | 1.13E−09 | 371 | 15.20 |
| 214 | 3272 | 4.86E−10 | 371 | 14.70 |
| 224 | 3282 | 4.71E−08 | 235 | nd |

¹ Affinity and maximum response of engineered immunoglobulins toward hFcαRI were determined by SPR experiment, following the procedure described in Example 5b.
² Aggregation propensity was measured following the procedure described in Example 4.
nd: not determined

TABLE 45
Affinity and maximum response of Fc variants, based on
parental IgA2 (SEQ ID NO: 3), towards hFcαRI as
determined by SPR experiment described in Example 5b.

| SEQ ID | Ref | KD (1:1) | Max response at 31.25 |
|---|---|---|---|
| NO | number | (M) | nM hFcαRI (RU) |
| 185 | 3243 | 8.45E−09 | 157 |
| 200 | 3258 | 4.02E−09 | 179 |
| 231 | 3315 | 1.45E−09 | 190 |
| 202 | 3260 | 8.34E−09 | 185 |
| 233 | 3317 | 1.06E−09 | 201 |
| 204 | 3262 | 1.13E−09 | 191 |

TABLE 46
Affinity and maximum response of Fc variants, based on parental
IgG1 engineered immunoglobulin (SEQ ID NO: 122), towards
hFcαRI as determined by SPR experiment described in Example 5b.

| SEQ ID | Ref | KD (1:1) | Max response at 31.25 |
|---|---|---|---|
| NO | number | (M) | nM hFcαRI (RU) |
| 189 | 3247 | 9.34E−09 | 259 |
| 236 | 3320 | 2.56E−09 | 252 |
| 238 | 3322 | 5.40E−09 | 220 |
| 240 | 3324 | 3.24E−10 | 249 |
| 242 | 3326 | 2.95E−10 | 248 |
| 209 | 3267 | 2.19E−10 | 268 |

TABLE 47
Affinity and maximum response of Fc variants, based on parental IgG1
engineered immunoglobulin (SEQ ID NO: 148), towards hFcαRI as
determined by SPR experiment described in Example 5b.

| SEQ ID | Ref | KD (1:1) | Max response at 31.25 |
|---|---|---|---|
| NO | number | (M) | nM hFcαRI (RU) |
| 195 | 3253 | 2.25E−08 | 187 |
| 197 | 3255 | 2.92E−08 | 139 |
| 199 | 3257 | 1.49E−08 | 239 |
| 245 | 3329 | 9.11E−09 | 229 |
| 248 | 3332 | 1.20E−09 | 237 |
| 249 | 3333 | 8.80E−10 | 189 |
| 212 | 3270 | 5.17E−09 | 290 |
| 251 | 3335 | 6.51E−10 | 240 |
| 213 | 3271 | 3.82E−10 | 322 |
| 214 | 3272 | 1.96E−10 | 313 |

[0279] 3.4 Translation of Affinity Maturation to Enhancement of Alpha Effector Function in In Vitro Assays

[0280] Lead candidates having a homodimeric Fc comprised within SEQ ID NOs: 204, 209 and 214 were selected for their improved binding capacities towards hFcαRI. They were next tested in a PMN killing assay following the procedure described in Example 6. Potency (EC₅₀; concentration of the immunoglobulin required to produce 50% of its maximal effect) and efficacy (Emax; maximum effect expected of the immunoglobulin) results are shown in FIG. 20 to FIG. 24.

[0281] All tested candidates were active and were shown to have an improved efficacy compared to the parental IgA2 in a SK-BR-3 PMN killing assay (FIG. 20).

[0282] In addition, a substantial improvement in efficacy was shown in a PMN killing assay using Calu-3 cells (FIG. 21) where HER2 receptor density is known to be lower than SK-BR-3 cells (described in Example 6). Moreover, a substantial improvement in potency was shown for the variant having SEQ ID NO: 214 in a PMN killing assay on MDA-MB-453 cells, also known to express a lower level of HER2 receptors (FIG. 22).

[0283] Finally, the affinity matured variant having SEQ ID NO: 214 was tested in a PMN killing assay using MDA-MB-175 cells, known as the lowest HER2 expressing cell line, and showed no killing, even at very high concentrations (FIG. 23). This observation highlights the safe profile of the tested candidates.

[0284] The mutation set of Q_CH2.94_E, L_CH2.97_Y and S_CH3.45_D was applied to the ‘hole’ arm of a heterodimeric Fc comprised within SEQ ID NO: 157 resulting in SEQ ID NO: 252. Heterodimeric Fc candidates comprising SEQ ID NO: 252-159 and SEQ ID NO: 252-161 (shown schematically in FIG. 7d) were tested against the lead Fc heterodimers from Example 2 having SEQ ID NO: 157-159 and SEQ ID NO: 157-161. The engineered IgG1 immunoglobulins with Fc domains comprised within SEQ ID NO: 252-159 and SEQ ID NO: 252-161 were shown to have better killing properties on SK-BR-3 cells in PMN killing assays, compared to their parental immunoglobulins and IgA2 (FIGS. 24a and 24c) but showed no effect in a PBMC killing assay to mediate gamma response (FIGS. 24b and 24d). Introducing the mutations derived from affinity maturation into the Fc domain recognizing hFcαRI improves alpha receptor binding but does not affect gamma receptor binding.

### Example 4: Expression and Purification of Engineered Proteins

[0285] Nucleic acid sequences coding for heavy and light chains were synthesized at Geneart (LifeTechnologies) and cloned into a mammalian expression vector using restriction enzyme-ligation based cloning techniques. The resulting plasmids were co-transfected into HEK293T cells. In brief, for transient expression of immunoglobulins (IgG, IgA and engineered immunoglobulins), equal quantities of light chain and each engineered heavy chain vectors were co-transfected into suspension-adapted HEK293T cells using Polyethylenimine ((PEI) Ref. cat#24765 Polysciences, Inc.). Typically, 100 ml of cells in suspension at a density of 1-2 Mio cells per ml was transfected with DNA containing 50 μg of expression vector encoding the engineered heavy chain and 50 μg expression vectors encoding the light chain. The recombinant expression vectors were then introduced into the host cells and the construct produced by further culturing of the cells for a period of 7 days to allow for secretion into the culture medium (HEK, serum-fee medium) supplemented with 0.1% pluronic acid, 4 mM glutamine, and 0.25 μg/ml antibiotic.

[0286] The produced constructs were then purified from cell-free supernatant using immuno-affinity chromatography. Anti-Kappa LC resin (KappaSelect, GE Healthcare Life Sciences), equilibrated with PBS buffer pH 7.4 was incubated with filtered conditioned media using liquid chromatography system (Aekta pure chromatography system, GE Healthcare Life Sciences). The resin was washed with PBS pH 7.4 before the constructs were eluted with elution buffer (50 mM citrate, 90 mM NaCl, pH 2.7).

[0287] After capture, eluted proteins were pH neutralized using 1M TRIS pH 10.0 solution and polished using size exclusion chromatography technique (HiPrep Superdex 200 16/60, GE Healthcare Life Sciences). Purified proteins were finally formulated in PBS buffer pH 7.4.

[0288] Aggregation propensity was measured after capture and pH neutralization step using analytical size exclusion chromatography technique (Superdex 200 Increase 3.2/300 GL, GE Healthcare Life Sciences)

### Example 5: SPR Measurement Against Human Fc Receptors

[0289] A direct binding assay was performed to characterize the binding of the engineered immunoglobulins (in full antibody format) against hFcαR, hFcγRIa, hFcγRIIIa or hFcRn.

[0290] Kinetic binding affinity constants (KD) were measured on a BIAcore® T200 instrument (GE Healthcare, Glattbrugg, Switzerland) at room temperature, with proteins diluted in running buffer 10 mM NaP, 150 mM NaCl, 0.05% Tween 20, pH7.6. A CM5 sensor chip (Sensor Chip SA, GE Healthcare Life Sciences) immobilized with an anti-kappa light chain scFv by amine coupling (Example 5a) or a streptavidin sensor chip (Sensor Chip SA, GE Healthcare Life Sciences) immobilized with a biotinylated anti-kappa light chain scFv (Example 5b) were used to capture engineered immunoglobulins, and recombinant human hFcαR, recombinant human hFcγRIa, recombinant human hFcγRIIIa or recombinant human hFcRn was used as the analyte, as appropriate.

[0291] To serve as a reference, one flow cell did not capture any immunoglobulin. Binding data were acquired by subsequent injection of analyte dilution series on the reference and measuring flow cells. Zero concentration samples (running buffer only) were included to allow double referencing during data evaluation. For data evaluation, doubled referenced sensorgrams were analyzed by applying a 1:1 binding model analysis to generate the equilibrium dissociation constant (KD). In addition, the maximum response reached during the experiment was monitored. Maximum response describes the binding capacity of the surface in terms of the response at saturation.

### Example 6: Antibody-Dependent Cell Cytotoxicity (ADCC) Assay

[0292] Blood samples were obtained from healthy donors, collected from freshly drawn peripheral blood, according to the Swiss human research act (Basel tissue donor program—Prevomed). After lysis of red blood cells with ACK lysis buffer, Polymorphonuclear cells (PMN) or Peripheral Blood Mononuclear cells (PBMC) were isolated by ficoll-paque gradient. PMN were used to characterize alpha effector function of engineered immunoglobulins, whereas PBMC were used to characterize gamma effector function of the engineered immunoglobulins.

[0293] Effector cells (freshly isolated PMN or PBMC cells) were added to HER2 expressing target cells (SK-BR-3, Calu-3, MDA-MB-453 or MDA-MB-175 cells, purchased at the American Type Culture Collection, Rockville Md.) at an effector to target ratio of 20:1. SK-BR-3 is a breast cancer cell line overexpressing HER2. Calu-3 and MDA-MB-453 are lung and breast cancer cell lines respectively, overexpressing HER2 at a lower level compared to SK-BR-3 (Cheung et al., 2019). MDA-MD-175 is a breast cancer cell line expressing the lowest amount of HER2 (Crocker et al., 2005).

[0294] The immunoglobulin construct was added at the indicated concentration and the combination was gently mixed and then centrifuged at 260×g for 4 minutes without break to encourage co-localization of target and effector cells. The assay was then incubated for 18 hours at 37° C. in 5% CO₂ in a standard tissue culture incubator. After 18 hours, supernatant was used for LDH release measurements using Cytotox96 reagent (Promega) according to the manufacturer instructions. Absorbance at 490 nm was read on a Biotek Synergy HT plate reader. Data were graphed and analyzed using GraphPad Prism 6.0.

### Example 7: Antibody-Dependent Cell Phagocytosis (ADCP) Assay

[0295] Monocytes were freshly isolated from healthy human blood and differentiated for 6 days using human M-CSF. Celltrace violet-labeled monocytes-derived macrophages (effector cells) were added to CFSE-labeled HER2 expressing target cells (SK-BR-3 overexpressing cells) at an effector to target ratio of 8:1. Immunoglobulin was added at the indicated concentration, and the combination was gently mixed. The assay was then incubated for 2 hours at 37° C. in 5% CO₂ in a standard tissue culture incubator. Phagocytosis was quantified by analyzing the double positive population using BD science FACS Fortessa flow cytometer. Data were graphed and analyzed using GraphPad Prism 6.0.

### Example 8: Thermal Stability Assessment by Differential Scanning Calorimetry (DSC)

[0296] The thermal stability of engineered immunoglobulins and their parental IgG1 and IgA2 were compared using calorimetric measurements, as described below.

[0297] calorimetric measurements were carried out on a differential scanning micro calorimeter (Nano DSC, TA Instrument). The cell volume was 0.3 ml and the heating rate was 1° C./min. All proteins were used at a concentration of 1 mg/ml in PBS (pH 7.4). The molar heat capacity of each protein was estimated by comparison with duplicate samples containing identical buffer from which the protein had been omitted. The partial molar heat capacities and melting curves were analyzed using standard procedure. Thermograms were baseline corrected and concentration normalized.

[0298] FIG. 25 shows overall improvement of thermal stability of the engineered immunoglobulins compare to both parental IgA2 and wild-type IgG1 demonstrating that immunoglobulin engineering resulted in a stable molecule with improved thermal stability over parental immunoglobulins.

[0299] Corresponding recombinant Fcs were generated and their thermal stability compared using same method (FIG. 26), independently of the Fab. Melting temperature (TM) of individual CH2 and CH3 domains could be determined (Table 48), showing how engineered Fcs are all more stable than both parental IgA2 and IgG1. Ranking of Fcs and engineered immunoglobulins regarding their overall thermostability stay the same but it is interesting to see that Fab fusion can affect the Fc thermostability.

TABLE 48
Melting temperature (TM) of individual CH2 and CH3 domains measured on Fc
constructs, free of Fab fragment. Variations of TM compared to parental
IgA2 Fc are shown in parenthesis.

| SEQ ID NO | CH2 TM (° C.) | CH3 TM (° C.) |
|---|---|---|
| SEQ ID NO: 125-IgA_Fc | 73 | 77 |
| SEQ ID NO: 126-2768_Fc | 77 (+4) | 77 |
| SEQ ID NO: 127-2729_Fc | 73 | 77 |
| SEQ ID NO: 128-2771_Fc | 84 (+11) | 89 (+12) |
| SEQ ID NO: 129-2772_Fc | 83 (+10) | 89 (+12) |

### Example 9: Improvement of Engineered Immunoglobulins Pharmacokinetic (PK) Properties Compare to IgA

[0300] 9.1 Engineered Immunoglobulin Material Production

[0301] Nucleic acids coding for anti-HER2 engineered immunoglobulin heavy chain variants SEQ ID NOs: 1, 3, 157, 159, 212, 252, 256, 257, 258 were synthesized at Geneart (LifeTechnologies) and cloned into a mammalian expression vector using restriction enzyme-ligation based cloning techniques. Selected N-glycosylation sites were removed by substitution of concerned Asp residues by Ala. The resulting plasmids coding for the heavy chain were co-transfected with the plasmid coding for light chain (SEQ ID NO: 124) into a mammalian expression system. For the HEK293T expression cell line, expression was performed according to the procedure described Example 4. For the CHO-S expression cell line (Thermo), the following procedure was used. In brief, for transient protein expression, the expression vector was transfected into suspension-adapted CHO-S cells using the ExpifectamineCHO transfecting agent (Thermo). Typically, 400 ml of cells in suspension at a density of 6 Mio cells per ml were transfected with DNA containing 400 μg of expression vector encoding the engineered protein. The recombinant expression vector was then introduced into the host cells for further secretion for seven days in culture medium (ExpiCHO expression media, supplemented with ExpiCHO feed and enhancer reagent (Thermo)). The constructs produced were then purified from cell-free supernatant according to the procedure described Example 4. The generated material is described in Tables 49 and 50 and measured immunoglobulins concentrations in serum were plotted in function of time and presented in FIGS. 27 and 28.

TABLE 49
Description of immunoglobulins produced
in HEK293T mammalian system

| | Description, with numbering is |
|---|---|
| SEQ | according to IMGT |
| ID | numbering for C-domain |
| 1 | IgG1 |
| 3 | IgG2 |
| 157- | Heterodimeric engineered IgG1 |
| 159 | recruits CD89 via first half-Fc, |
| | recruits FcγRs and FcRn |
| | via second half-Fc |
| 252- | Heterodimeric engineered IgG1 |
| 159 | recruits CD89 via first |
| | half Fc (affinity matured), |
| | recruits FcγRs and FcRn |
| | via second half-Fc |

TABLE 50
Description of immunoglobulins produced
in CHO mammalian system

| | Description, with numbering |
|---|---|
| SEQ | is according to IMGT |
| ID | numbering for C-domain |
| 1 | IgG1 |
| 3 | IgG2 |
| 252- | Heterodimer engineered IgG1. |
| 159 | recruits CD89 via first |
| | half Fc (affinity matured), |
| | recruits FcγRs and FcRn |
| | via second half-Fc. |
| 212 | Homodimer engineered IgG1 |
| 256 | Homodimer engineered IgG1 |
| | N_CH2.20_A |
| 257 | Homodimer engineered IgG1 |
| | N_CH2.84.4_A |
| 258 | Homodimer engineered IgG1 |
| | N_CH2.20_A |
| | N_CH2.84.4_A |

[0302] In line with construct design and previous SPR measurements, engineered immunoglobulins with sequences SEQ ID NOs:157-159 and SEQ ID NOs: 252-159 bound to CD89 while retaining binding to FcRn (as described Example 5) and show improved PK properties and an improved half-life compared to IgA immunoglobulin, as shown in FIG. 27.

[0303] Moreover, as shown in FIG. 27, the affinity matured variant with sequence SEQ ID NOs: 252-159 exhibits an identical PK profile as the parental immunoglobulin with sequence SEQ ID NOs:157-159. This indicates that affinity maturation towards CD89 does impair the PK properties of the engineered immunoglobulins.

[0304] Data presented in FIG. 28 describe how the N-glycosylation pattern affects immunoglobulin PK. As shown, the PK properties of the engineered immunoglobulins were improved compared to IgA and improved when the individual N-glycosylation site CH2.84.4 was removed (SEQ ID NO: 257).

[0305] 9.2 Mouse Studies

[0306] Male CD1 mice were obtained from Charles River laboratories. Following arrival, all mice were maintained in a pathogen-free animal facility under a standard 12 h light/12 h dark cycle at 21° C. room temperature with access to food and water ad libitum. All mice received a single intravenous (IV) injection of IgG or IgA or engineered immunoglobulin (3 mg/kg) produced and purified as described above. Each compound was injected into three mice. Blood samples were collected into serum separator tubes via saphenous vein at various times post injection. The blood was allowed to clot at ambient temperature for at least 20 min. Clotted samples were maintained at room temperature until centrifuged, commencing within 1 h of the collection time. Each sample was centrifuged at a relative centrifugal force of 1500-2000×g for 5 min at 2-8° C. The serum was separated from the blood sample within 20 min after centrifugation and transferred into labelled 2.0-mL polypropylene, conical-bottom microcentrifuge tubes. Only animals that appeared to be healthy and that were free of obvious abnormalities were used for the study. All animal work performed was reviewed and approved by Novartis' Institutional Animal Care and Use Committee.

[0307] 9.3 Immunoglobulin ELISA for Pharmacokinetic Studies

[0308] Immunoglobulin levels were measured by sequential sandwich ELISA. For IgA dosing, wells of Nunc Maxisorp microtiter plates were coated overnight at 4° C. with goat anti-human IgA (Southern Biotech, Cat #2053-01). For IgG and engineered immunoglobulins dosing, wells of Roche StreptaWell microtiter plates were coated 1 h at room temperature with biotinylated SB goat anti-human IgG (Southern Biotech, Cat #2049-08). After 1 h incubation with blocking buffer (PBS, 0.5% bovine serum albumin (BSA)), samples diluted in same blocking buffer were added to the blocked plates and incubated for 2 h at room temperature. After incubation, horseradish peroxidase-conjugated goat anti-human IgA (SouthernBiotech, Cat #2053-05) or horseradish peroxidase-conjugated goat anti-human IgG (SouthernBiotech, Cat #2049-05) were added and incubated for 1 h at room temperature. The plates were then incubated with substrate solution (BMBlue POD Substrate TMB, Roche, Cat #11484281001), and the reaction was stopped with 0.5M sulfuric acid. Absorbance was measured at 450 nm with a reduction at 650 nm using a plate reader. Between steps, plates were washed 3 times with washing buffer (0.05% Tween-20 in PBS).

[0309] Sequence Information

[0310] Table 51 lists the amino acid sequences (SEQ ID NOs) of the full length heavy chains comprising the variant Fc regions as described in the examples as well as the light chain used to generate complete antibodies. The engineered IgG1 immunoglobulins, full length heavy chains, light chains or complete antibodies as described herein can be produced using conventional recombinant protein production and purification processes.

[0311] All the sequences referred to in this specification (SEQ ID NOs) are found in Table 51. Throughout the text of this application, should there be a discrepancy between the text of the specification (e.g., Table 51) and the sequence listing, the text of the specification shall prevail. Ref No refers to an internal sequence reference number.

TABLE 51
Sequence Table

| SEQ | | Ref |
|---|---|---|
| ID NO: | Sequence | No: |
| 1 | evqlvesggglvqpggslrlscaasgfnikdtyihwvrqapgkglewvariyptngytryadsv | 2257 |
| | kgrftisadtskntaylqmnslraedtavyycsrwggdgfyamdywgqgtlvtvssastkgpsv | |
| | fplapsskstsggtaalgclvkdvfpepvtvswnsgaltsgvhtfpavlqssglvslssvvtvp | |
| | ssslgtqtyicnvnhkpsntkvdkkvepkscdkthtcppcpapellggpsvflfppkpkdtlmi | |
| | srtpevtcvvvdvshedpevkfnwyvdgvevhnaktkpreeqynstyrvvsvltvlhqdwlngk | |
| | eykckvsnkalpapiektiskakgqprepqvytlppsrdeltknqvsltclvkgfypsdiavew | |
| | esngqpennykttppvldsdgsfflyskltvdksrwqqgnvfscsvmhealhnhytqkslslsp | |
| 2 | evqlvesggglvqpggslrlscaasgfnikdtyihwvrqapgkglewvariyptngytryadsv | 2258 |
| | kgrftisadtskntaylqmnslraedtavyycsrwggdgfyamdywgqgtlvtvssasptspkv | |
| | fplsldstpgdgnvvvaclvqqffpgeplsvtwsesggnvtarnfppsqdasqdlyttssqltl | |
| | patqcpdgksvtchvkhytnpsqdvtvpcpvpppppcchprlslhrpaledlllgseanltctl | |
| | tglrdasgatftwtpssgksavqgpperdlcgcysvssvlpgcaqpwnhgetftctaahpelkt | |
| | pltanitksgntfrpevhllpppseelalnelvtltclargfspkdvlvrwlqgsqelprekyl | |
| | twasrqepsqgtttfavtsilrvaaedwkkgdtfscmvghealplaftqktidrla | |
| 3 | evqlvesggglvqpggslrlscaasgfnikdtyihwvrqapgkglewvariyptngytryadsv | 2737 |
| | kgrftisadtskntaylqmnslraedtavyycsrwggdgfyamdywgqgtlvtvssasptspkv | |
| | fplsldstpqdgnvvvaclvqgffpqeplsvtwsesgqnvtarnfppsqdasgdlyttssqltl | |
| | patqcpdgksvtchvkhytnpsqdvtvpcrvpppppcchprlslhrpaledlllgseanltctl | |
| | tglrdasgatftwtpssgksavqgpperdlcgcysvssvlpgcaqpwnhgetftctaahpelkt | |
| | pltanitksgntfrpevhllpppseelalnelvtltclargfspkdvlvrwlqgsqelprekyl | |
| | twasrqepsqgtttfavtsilrvaaedwkkgdtfscmvghealplaftqktidrla | |
| 4 | evqlvesggglvqpggslrlscaasgfnikdtyihwvrqapgkglewvariyptngytryadsv | 2259 |
| | kgrftisadtskntaylqmnslraedtavyycsrwggdgfyamdywgqgtlvtvssastkgpsv | |
| | fplapsskstsggtaalgclvkdvfpepvtvswnsgaltsgvhtfpavlqssglvslssvvtvp | |
| | ssslgtqtyicnvnhkpsntkvdkkvvpppppcchprlslhrpaledlllgseanltctltglr | |
| | dasgatftwtpssgksavqgpperdlcgcysvssvlpgcaqpwnhgetftctaahpelktplta | |
| | nitksgntfrpevhllpppseelalnelvtltclargfspkdvlvrwlqgsqelprekyltwas | |
| | rqepsqgtttfavtsilrvaaedwkkgdtfscmvghealplaftqktidrla | |
| 5 | evqlvesggglvqpggslrlscaasgfnikdtyihwvrqapgkglewvariyptngytryadsv | 2260 |
| | kgrftisadtskntaylqmnslraedtavyycsrwggdgfyamdywgqgtlvtvssastkgpsv | |
| | fplapsskstsggtaalgclvkdyfpepvtvswnsgaltsgvhtfpavlqssglyslssvvtvp | |
| | ssslgtqtyicnvnhkpsntkvdkkvvpppppcchprlslhrpaledlllgseanltctltglr | |
| | dasgatftwtpssgksavqgpperdlcgcysvssvlpgcaqpwnhgetftctaahpelktplta | |
| | niskakgqprepevhllpppseelalnelvtltclargfspkdvlvrwlqgsqelprekyltwa | |
| | srqepsqgtttfavtsilrvaaedwkkgdtfscmvghealplaftqktidrla | |
| 6 | evqlvesggglvqpggslrlscaasgfnikdtyihwvrqapgkglewvariyptngytryadsv | 2261 |
| | kgrftisadtskntaylqmnslraedtavyycsrwggdgfyamdywgqgtlvtvssastkgpsv | |
| | fplapsskstsggtaalgclvkdyfpepvtvswnsgaltsgvhtfpavlqssglyslssvvtvp | |
| | ssslgtqtyicnvnhkpsntkvdkkvvpppppcchprlslhrpaledlllgseanltctltglr | |
| | dasgatftwtpssgksavqgpperdlcgcysvssvlpgcaqpwnhgetftctaahpelktplta | |
| | niskagqprepevhllpppseelalnelvtltclargfspkdvlvrwlqgsqelprekyltwas | |
| | rqepsqgtttfavtsilrvaaedwkkgdtfscmvghealplaftqktidrla | |
| 7 | evqlvesggglvqpggslrlscaasgfnikdtyihwvrqapgkglewvariyptngytryadsv | 2262 |
| | kgrftisadtskntaylqmnslraedtavyycsrwggdgfyamdywgqgtlvtvssastkgpsv | |
| | fplapsskstsggtaalgclvkdyfpepvtvswnsgaltsgvhtfpavlqssglyslssvvtvp | |
| | ssslgtqtyicnvnhkpsntkvdkkvepkscdkthtcppcphprlslhrpaledlllgseanlt | |
| | ctltglrdasgatftwtpssgksavqgpperdicgcysvssvlpgcaqpwnhgetftetaahpe | |
| | lktpltanitksgntfrpevhllpppseelalnelvtltclargfspkdvlvrwlqgsqelpre | |
| | kyltwasrqepsqgtttfavtsilrvaaedwkkgdtfscmvghealplaftqktidrla | |
| 8 | evqlvesggglvqpggslrlscaasgfnikdtyihwvrqapgkglewvariyptngytryadsv | 2263 |
| | kgrftisadtskntaylqmnslraedtavyycsrwggdgfyamdywgqgtlvtvssastkgpsv | |
| | fplapsskstsggtaalgclvkdyfpepvtvswnsgaltsgvhtfpavlqssglyslssvvtvp | |
| | ssslgtqtyicnvnhkpsntkvdkkvepkscdkthtcppcphprlslhrpaledlllgseanlt | |
| | ctltglrdasgatftwtpssgksavqgpperdicgcysvssvlpgcaqpwnhgetftetaahpe | |
| | lktpltaniskakgqprepevhllpppseelalnelvtitelargfspkdvivrwlqgsqelpr | |
| | ekyltwasrqepsqgtttfavtsilrvaaedwkkgdtfscmvghealplaftqktidrla | |
| 9 | evqlvesggglvqpggslrlscaasgfnikdtyihwvrqapgkglewvariyptngytryadsv | 2264 |
| | kgrftisadtskntaylqmnslraedtavyycsrwggdgfyamdywgqgtlvtvssastkgpsv | |
| | fplapsskstsggtaalgclvkdyfpepvtvswnsgaltsgvhtfpavlqssglyslssvvtvp | |
| | ssslgtqtyicnvnhkpsntkvdkkvepkscdkthtcppcphprlslhrpaledlllgseanlt | |
| | ctltglrdasgatftwtpssgksavqgpperdicgcysvssvlpgcaqpwnhgetftctaahpe | |
| | iktpltaniskagqprepevhllpppseelalnelvtitclargfspkdvlvrwlqgsqelpre | |
| | kyltwasrqepsqgtttfavtsilrvaaedwkkgdtfscmvghealplaftqktidrla | |
| 10 | evqlvesggglvqpggslrlscaasgfnikdtyihwvrqapgkglewvariyptngytryadsv | 2265 |
| | kgrftisadtskntaylqmnslraedtavyycsrwggdgfyamdywgqgtlvtvssastkgpsv | |
| | fplapsskstsggtaalgclvkdyfpepvtvswnsgaltsgvhtfpavlqssglyslssvvtvp | |
| | ssslgtqtyicnvnhkpsntkvdkkvepkscdkthtcppcpapellggpsvflfrpaledlllg | |
| | sepevtcvvvdvshedpevkfnwyvdgvevhnaktkpreeqynstyrvvsvlpgcaqpwnhgke | |
| | ykckvsnkalpapiektitksgntfrpevhllpppseelalnelvtltclargfspkdvivrwl | |
| | qgsqelprekyltwasrqepsqgtttfavtsilrvaaedwkkgdtfscmvghealplaftqkti | |
| | drla | |
| 11 | evqlvesggglvqpggslrlscaasgfnikdtyihwvrqapgkglewvariyptngytryadsv | 2266 |
| | kgrftisadtskntaylqmnslraedtavyycsrwggdgfyamdywgqgtlvtvssastkgpsv | |
| | fplapsskstsggtaalgclvkdyfpepvtvswnsgaltsgvhtfpavlqssglyslssvvtvp | |
| | ssslgtqtyicnvnhkpsntkvdkkvepkscdkthtcppcpapellggpsvflfrpaledlllg | |
| | seanvtcvvvdvshedpevkfnwyvdgvevhnaktkpreeqynstyrvvsvlpgcaqpwnhgke | |
| | ykckvsnkalpapiektitksgntfrpevhllpppseelalnelvtltclargfspkdvivrwl | |
| | qgsqelprekyltwasrqepsqgtttfavtsilrvaaedwkkgdtfscmvghealplaftqkti | |
| | drla | |
| 12 | evqlvesggglvqpggslrlscaasgfnikdtyihwvrqapgkglewvariyptngytryadsv | 2267 |
| | kgrftisadtskntaylqmnslraedtavyycsrwggdgfyamdywgqgtlvtvssastkgpsv | |
| | fplapsskstsggtaalgclvkdyfpepvtvswnsgaltsgvhtfpavlqssglyslssvvtvp | |
| | ssslgtqtyicnvnhkpsntkvdkkvepkscdkthtcppcpapellggpsvflfrpaledlllg | |
| | seanvtcvvvdvshedpevkfnwyvdgvevhnaktkpreeqynstyrvvsvlpglaqpwnhgke | |
| | ykckvsnkalpapiektitksgntfrpevhllpppseelalnelvtltclargfspkdvivrwl | |
| | qgsqelprekyltwasrqepsqgtttfavtsilrvaaedwkkgdtfscmvghealplaftqkti | |
| | drla | |
| 13 | evqlvesggglvqpggslrlscaasgfnikdtyihwvrqapgkglewvariyptngytryadsv | 2268 |
| | kgrftisadtskntaylqmnslraedtavyycsrwggdgfyamdywgqgtlvtvssastkgpsv | |
| | fplapsskstsggtaalgclvkdyfpepvtvswnsgaltsgvhtfpavlqssglyslssvvtvp | |
| | ssslgtqtyicnvnhkpsntkvdkkvepkscdkthtcppcphprlslhrpaledlllgseanlt | |
| | ctltglrdasgatftwtpssgksavqgpperdicgcysvssvlpgcaqpwnhgetftetaahpe | |
| | iktpltanitksgntfrpqvytlppsrdeltknqvsltclvkgfypsdilvrwlqgsqelnnyk | |
| | ttppvldsdgsfflyskltvdksrwqqgntfscmvghealplaftqktlslsp | |
| 14 | evqlvesggglvqpggslrlscaasgfnikdtyihwvrqapgkglewvariyptngytryadsv | 2343 |
| | kgrftisadtskntaylqmnslraedtavyycsrwggdgfyamdywgqgtlvtvssastkgpsv | |
| | fplapsskstsggtaalgclvkdyfpepvtvswnsgaltsgvhtfpavlqssglyslssvvtvp | |
| | ssslgtqtyicnvnhkpsntkvdkkvepkscdkthtcppcpapellggpsvflfrpaledlllg | |
| | seanvtcvvvdvshedpevkfnwyvdgvevhnaktkpreeqyastyrvvsvlpglaqpwnhgke | |
| | ykekvsnkaipapiektiskagqprepevhllpppseelalnelvtitclargfspkdvivrwl | |
| | qgsqelprekyltwasrqepsqgtttfavtsilrvaaedwkkgdtfscmvghealplaftqkti | |
| | drla | |
| 15 | evqlvesggglvqpggslrlscaasgfnikdtyihwvrqapgkglewvariyptngytryadsv | 2344 |
| | kgrftisadtskntaylqmnslraedtavyycsrwggdgfyamdywgqgtlvtvssastkgpsv | |
| | fplapsskstsggtaalgclvkdyfpepvtvswnsgaltsgvhtfpavlqssglyslssvvtvp | |
| | ssslgtqtyicnvnhkpsntkvdkkvepkscdkthtcppcpapellggpsvflfrpaledlllg | |
| | seanvtcvvvdvshepevkfnwyvdgvevaktkpreeqyngtyrvvsvlpglaqpwnhgkeykc | |
| | kvsnkalpapiektiskagqprepevhllpppseelalnelvtltclargfspkdvlvrwlqgs | |
| | qelprekyltwasrqepsqgtttfavtsilrvaaedwkkgdtfscmvghealplaftqktidrl | |
| | a | |
| 16 | evqlvesggglvqpggslrlscaasgfnikdtyihwvrqapgkglewvariyptngytryadsv | 2345 |
| | kgrftisadtskntaylqmnslraedtavyycsrwggdgfyamdywgqgtlvtvssastkgpsv | |
| | fplapsskstsggtaalgclvkdyfpepvtvswnsgaltsgvhtfpavlqssglyslssvvtvp | |
| | ssslgtqtyicnvnhkpsntkvdkkvepkscdkthtcppcgpsvflfrpaledlllgseanvtc | |
| | vvvdvshepevkfnwyvdgvevaktkpreeqyngtyrvvsvlpglaqpwnhgkeykckvsnkal | |
| | papiektiskagqprepevhllpppseelalnelvtitclargfspkdvlvrwlqgsqelprek | |
| | yltwasrqepsqgtttfavtsilrvaaedwkkgdtfscmvghealplaftqktidrla | |
| 17 | evqlvesggglvqpggslrlscaasgfnikdtyihwvrqapgkglewvariyptngytryadsv | 2346 |
| | kgrftisadtskntaylqmnslraedtavyycsrwggdgfyamdywgqgtlvtvssastkgpsv | |
| | fplapsskstsggtaalgclvkdyfpepvtvswnsgaltsgvhtfpavlqssglyslssvvtvp | |
| | ssslgtqtyicnvnhkpsntkvdkkvepkscdkthtcppcpapelccgpsvflfrpaledlllg | |
| | seanvtcvvvdvshepevkfnwyvdgvevaktkpreeqycgcyrvvsvlpglaqpwnhgkeykc | |
| | kvsnkalpapiektiskagqprepevhllpppseelalnelvtitclargfspkdvlvrwlqgs | |
| | qelprekyltwasrqepsqgtttfavtsilrvaaedwkkgdtfscmvghealplaftqktidrl | |
| | a | |
| 18 | evqlvesggglvqpggslrlscaasgfnikdtyihwvrqapgkglewvariyptngytryadsv | 2347 |
| | kgrftisadtskntaylqmnslraedtavyycsrwggdgfyamdywgqgtlvtvssastkgpsv | |
| | fplapsskstsggtaalgclvkdyfpepvtvswnsgaltsgvhtfpavlqssglyslssvvtvp | |
| | ssslgtqtyicnvnhkpsntkvdkkvepkscdkthtcppcpccgpsvflfrpaledlllgsean | |
| | vtcvvvdvshepevkfnwyvdgvevaktkpreeqycgcyrvvsvlpglaqpwnhgkeykckvsn | |
| | kalpapiektiskagqprepevhllpppseelalnelvtitclargfspkdvlvrwlqgsqelp | |
| | rekyltwasrqepsqgtttfavtsilrvaaedwkkgdtfscmvghealplaftqktidrla | |
| 19 | evqlvesggglvqpggslrlscaasgfnikdtyihwvrqapgkglewvariyptngytryadsv | 2348 |
| | kgrftisadtskntaylqmnslraedtavyycsrwggdgfyamdywgqgtlvtvssastkgpsv | |
| | fplapsskstsggtaalgclvkdyfpepvtvswnsgaltsgvhtfpavlqssglyslssvvtvp | |
| | ssslgtqtyicnvnhkpsntkvdkkvepkscdkthtcppcpapellggpsvflfrpaledlllg | |
| | seanvtcvvvdvshedpevkfnwyvdgvevhnaktkpreeqyastyrvvsvlpgcaqpwnhgke | |
| | ykckvsnkalpapiektiskagqprepevhllpppseelalnelvtitclargfspkdvivrwl | |
| | qgsqelprekyltwasrqepsqgtttfavtsilrvaaedwkkgdtfscmvghealplaftqkti | |
| | drla | |
| 20 | evqlvesggglvqpggslrlscaasgfnikdtyihwvrqapgkglewvariyptngytryadsv | 2349 |
| | kgrftisadtskntaylqmnslraedtavyycsrwggdgfyamdywgqgtlvtvssastkgpsv | |
| | fplapsskstsggtaalgclvkdyfpepvtvswnsgaltsgvhtfpavlqssglyslssvvtvp | |
| | ssslgtqtyicnvnhkpsntkvdkkvepkscdkthtcppcpapellggpsvflfrpaledlllg | |
| | seanvtcvvvdvshepevkfnwyvdgvevaktkpreeqyngtyrvvsvlpgcaqpwnhgkeykc | |
| | kvsnkalpapiektiskagqprepevhllpppseelalnelvtitclargfspkdvlvrwlqgs | |
| | qelprekyltwasrqepsqgtttfavtsilrvaaedwkkgdtfscmvghealplaftqktidrl | |
| | a | |
| 21 | evqlvesggglvqpggslrlscaasgfnikdtyihwvrqapgkglewvariyptngytryadsv | 2350 |
| | kgrftisadtskntaylqmnslraedtavyycsrwggdgfyamdywgqgtlvtvssastkgpsv | |
| | fplapsskstsggtaalgclvkdyfpepvtvswnsgaltsgvhtfpavlqssglyslssvvtvp | |
| | ssslgtqtyicnvnhkpsntkvdkkvepkscdkthtcppcgpsvflfrpaledlllgseanvtc | |
| | vvvdvshepevkfnwyvdgvevaktkpreeqyngtyrvvsvlpgcaqpwnhgkeykckvsnkal | |
| | papiektiskagqprepevhllpppseelalnelvtitclargfspkdvlvrwlqgsqelprek | |
| | yltwasrqepsqgtttfavtsilrvaaedwkkgdtfscmvghealplaftqktidrla | |
| 22 | evqlvesggglvqpggslrlscaasgfnikdtyihwvrqapgkglewvariyptngytryadsv | 2351 |
| | kgrftisadtskntaylqmnslraedtavyycsrwggdgfyamdywgqgtlvtvssastkgpsv | |
| | fplapsskstsggtaalgclvkdyfpepvtvswnsgaltsgvhtfpavlqssglyslssvvtvp | |
| | ssslgtqtyicnvnhkpsntkvdkkvepkscdkthtcppcpapelccgpsvflfrpaledlllg | |
| | seanvtcvvvdvshepevkfnwyvdgvevaktkpreeqycgcyrvvsvlpgcaqpwnhgkeykc | |
| | kvsnkalpapiektiskagqprepevhllpppseelalnelvtitclargfspkdvlvrwlqgs | |
| | qelprekyltwasrqepsqgtttfavtsilrvaaedwkkgdtfscmvghealplaftqktidrl | |
| | a | |
| 23 | evqlvesggglvqpggslrlscaasgfnikdtyihwvrqapgkglewvariyptngytryadsv | 2352 |
| | kgrftisadtskntaylqmnslraedtavyycsrwggdgfyamdywgqgtlvtvssastkgpsv | |
| | fplapsskstsggtaalgclvkdyfpepvtvswnsgaltsgvhtfpavlqssglyslssvvtvp | |
| | ssslgtqtyicnvnhkpsntkvdkkvepkscdkthtcppcpccgpsvflfrpaledlllgsean | |
| | vtcvvvdvshepevkfnwyvdgvevaktkpreeqycgcyrvvsvlpgcaqpwnhgkeykckvsn | |
| | kalpapiektiskagqprepevhllpppseelalnelvtitclargfspkdvlvrwlqgsqelp | |
| | rekyltwasrqepsqgtttfavtsilrvaaedwkkgdtfscmvghealplaftqktidrla | |
| 24 | evqlvesggglvqpggslrlscaasgfnikdtyihwvrqapgkglewvariyptngytryadsv | 2353 |
| | kgrftisadtskntaylqmnslraedtavyycsrwggdgfyamdywgqgtlvtvssastkgpsv | |
| | fplapsskstsggtaalgclvkdyfpepvtvswnsgaltsgvhtfpavlqssglyslssvvtvp | |
| | ssslgtqtyicnvnhkpsntkvdkkvepkscdkthtcppcphprlslhrpaledlllgseanlt | |
| | ctltglrdasgatftwtpssgksavqgpperdlcgcysvssvlpgcaqpwnhgetftctaahpe | |
| | lktpltaniskagqprepqvytlppsrdeltknqvsltclvkgfypsdilvrwlqgsqelnnyk | |
| | ttppvldsdgsfflyskltvdksrwqqgntfscmvghealplaftqktlslsp | |
| 25 | evqlvesggglvqpggslrlscaasgfnikdtyihwvrqapgkglewvariyptngytryadsv | 2354 |
| | kgrftisadtskntaylqmnslraedtavyycsrwggdgfyamdywgqgtlvtvssastkgpsv | |
| | fplapsskstsggtaalgclvkdyfpepvtvswnsgaltsgvhtfpavlqssglyslssvvtvp | |
| | ssslgtqtyicnvnhkpsntkvdkkvepkscdkthtcppcphprlslhrpaledlllgseanlt | |
| | ctltglrdasgatftwtpssgksavqgpperdicgcysvssvlpgcaqpwnhgetftetaahpe | |
| | iktpltaniskagqprepqvytlppsrdeltknqvsltclvkgfypsdilvrwlqgsqelpren | |
| | ykttppvldsdgsfflyskltvdksrwqqgntfscmvghealplaftqktlslsp | |
| 26 | evqlvesggglvqpggslrlscaasgfnikdtyihwvrqapgkglewvariyptngytryadsv | 2355 |
| | kgrftisadtskntaylqmnslraedtavyycsrwggdgfyamdywgqgtlvtvssastkgpsv | |
| | fplapsskstsggtaalgclvkdyfpepvtvswnsgaltsgvhtfpavlqssglyslssvvtvp | |
| | ssslgtqtyicnvnhkpsntkvdkkvepkscdkthtcppcphprlslhrpaledlllgseanlt | |
| | ctltglrdasgatftwtpssgksavqgpperdicgcysvssvlpgcaqpwnhgetftctaahpe | |
| | lktpltaniskagqprepqvytlppsrdeltknqvsltclvkgfypsdilvrwlqgsqelpren | |
| | ykttppvldsdqgtgsfflyskltvdksrwqqgntfscmvghealplaftqktlslsp | |
| 27 | evqlvesggglvqpggslrlscaasgfnikdtyihwvrqapgkglewvariyptngytryadsv | 2356 |
| | kgrftisadtskntaylqmnslraedtavyycsrwggdgfyamdywgqgtlvtvssastkgpsv | |
| | fplapsskstsggtaalgclvkdyfpepvtvswnsgaltsgvhtfpavlqssglyslssvvtvp | |
| | ssslgtqtyicnvnhkpsntkvdkkvepkscdkthtcppcphprlslhrpaledlllgseanlt | |
| | ctltglrdasgatftwtpssgksavqgpperdicgcysvssvlpgcaqpwnhgetftetaahpe | |
| | iktpltaniskagqprepqvytlppsrdeltlknqvsltclvkgfypsdilvrwlqgsqelpre | |
| | nykttppvldsdqgtgsfflyskltvdksrwqqgntfscmvghealplaftqktlslsp | |
| 28 | evqlvesggglvqpggslrlscaasgfnikdtyihwvrqapgkglewvariyptngytryadsv | 2462 |
| | kgrftisadtskntaylqmnslraedtavyycsrwggdgfyamdywgqgtlvtvssastkgpsv | |
| | fplapsskstsggtaalgclvkdyfpepvtvswnsgaltsgvhtfpavlqssglyslssvvtvp | |
| | ssslgtqtyicnvnhkpsntkvdkkvepkscdkthtcppcpapellggpsvflfrpaledlllg | |
| | seanltctltglrdasgatftwtpssgksavqgpperdicgcysvssvlpgcaqpwnhgetftc | |
| | taahpelktpltanitksgntfrpevhllpppseelalnelvtltclargfspkdvlvrwlqgs | |
| | qelprekyltwasrqepsqgtttfavtsilrvaaedwkkgdtfscmvghealplaftqktidrl | |
| | a | |
| 29 | evqlvesggglvqpggslrlscaasgfnikdtyihwvrqapgkglewvariyptngytryadsv | 2463 |
| | kgrftisadtskntaylqmnslraedtavyycsrwggdgfyamdywgqgtlvtvssastkgpsv | |
| | fplapsskstsggtaalgclvkdyfpepvtvswnsgaltsgvhtfpavlqssglyslssvvtvp | |
| | ssslgtqtyicnvnhkpsntkvdkkvepkscdkthtcppcpcchprlslhrpaledlllgsean | |
| | vtcvvvdvshasgatftwtpssgksavqgpperdicgcysvssvlpgcaqpwnhgetftetaah | |
| | pelktpitanitksgntfrpevhllpppseelalnelvtltclargfspkdvlvrwlqgsqelp | |
| | rekyltwasrqepsqgtttfavtsilrvaaedwkkgdtfscmvghealplaftqktidrla | |
| 30 | evqlvesggglvqpggslrlscaasgfnikdtyihwvrqapgkglewvariyptngytryadsv | 2464 |
| | kgrftisadtskntaylqmnslraedtavyycsrwggdgfyamdywgqgtlvtvssastkgpsv | |
| | fplapsskstsggtaalgclvkdyfpepvtvswnsgaltsgvhtfpavlqssglyslssvvtvp | |
| | ssslgtqtyicnvnhkpsntkvdkkvepkscdkthtcppcpcchprlslhrpaledlllgsean | |
| | ltctltglrdedpevkfnwyvdggksavqgpperdicgcysvssvlpgcaqpwnhgetftctaa | |
| | hpeiktpltanitksgntfrpevhllpppseelalnelvtltclargfspkdvlvrwlqgsqel | |
| | prekyltwasrqepsqgtttfavtsilrvaaedwkkgdtfscmvghealplaftqktidrla | |
| 31 | evqlvesggglvqpggslrlscaasgfnikdtyihwvrqapgkglewvariyptngytryadsv | 2465 |
| | kgrftisadtskntaylqmnslraedtavyycsrwggdgfyamdywgqgtlvtvssastkgpsv | |
| | fplapsskstsggtaalgclvkdyfpepvtvswnsgaltsgvhtfpavlqssglyslssvvtvp | |
| | ssslgtqtyicnvnhkpsntkvdkkvepkscdkthtcppcpcchprlslhrpaledlllgsean | |
| | ltctltglrdasgatftwtpssvevhnaktkpreeqycgcysvssvlpgcaqpwnhgetfteta | |
| | ahpelktpltanitksgntfrpevhllpppseelalnelvtltclargfspkdvlvrwlqgsqe | |
| | lprekyltwasrqepsqgtttfavtsilrvaaedwkkgdtfscmvghealplaftqktidrla | |
| 32 | evqlvesggglvqpggslrlscaasgfnikdtyihwvrqapgkglewvariyptngytryadsv | 2466 |
| | kgrftisadtskntaylqmnslraedtavyycsrwggdgfyamdywgqgtlvtvssastkgpsv | |
| | fplapsskstsggtaalgclvkdyfpepvtvswnsgaltsgvhtfpavlqssglyslssvvtvp | |
| | ssslgtqtyicnvnhkpsntkvdkkvepkscdkthtcppcphprlslhrpaledlllgseanlt | |
| | ctltglrdasgatftwtpssgksavqgpperdlnstyrvvsvlpgcaqpwnhgetftetaahpe | |
| | lktpltanitksgntfrpevhllpppseelalnelvtltclargfspkdvlvrwlqgsqelpre | |
| | kyltwasrqepsqgtttfavtsilrvaaedwkkgdtfscmvghealplaftqktidrla | |
| 33 | evqlvesggglvqpggslrlscaasgfnikdtyihwvrqapgkglewvariyptngytryadsv | 2467 |
| | kgrftisadtskntaylqmnslraedtavyycsrwggdgfyamdywgqgtlvtvssastkgpsv | |
| | fplapsskstsggtaalgclvkdyfpepvtvswnsgaltsgvhtfpavlqssglyslssvvtvp | |
| | ssslgtqtyicnvnhkpsntkvdkkvepkscdkthtcppcpcchprlslhrpaledlllgsean | |
| | ltctltglrdasgatftwtpssgksavqgpperdicgcysvssvlpgcaqpwnhgkeykckvsn | |
| | kalktpltanitksgntfrpevhllpppseelalnelvtltclargfspkdvlvrwlqgsqelp | |
| | rekyltwasrqepsqgtttfavtsilrvaaedwkkgdtfscmvghealplaftqktidrla | |
| 34 | Evqlvesggglvqpggslrlscaasgfnikdtyihwvrqapgkglewvariyptngytryadsv | 2468 |
| | kgrftisadtskntaylqmnslraedtavyycsrwggdgfyamdywgqgtlvtvssastkgpsv | |
| | fplapsskstsggtaalgclvkdyfpepvtvswnsgaltsgvhtfpavlqssglyslssvvtvp | |
| | ssslgtqtyicnvnhkpsntkvdkkvepkscdkthtcppcpcchprlslhrpaledlllgsean | |
| | ltctltglrdasgatftwtpssgksavqgpperdlcgcysvssvlpgcaqpwnhgetftctaah | |
| | pelpapiektitksgntfrpevhllpppseelalnelvtltclargfspkdvlvrwlqgsqelp | |
| | rekyltwasrqepsqgtttfavtsilrvaaedwkkgdtfscmvghealplaftqktidrla | |
| 35 | evqlvesggglvqpggslrlscaasgfnikdtyihwvrqapgkglewvariyptngytryadsv | 2469 |
| | kgrftisadtskntaylqmnslraedtavyycsrwggdgfyamdywgqgtlvtvssastkgpsv | |
| | fplapsskstsggtaalgclvkdyfpepvtvswnsgaltsgvhtfpavlqssglyslssvvtvp | |
| | ssslgtqtyicnvnhkpsntkvdkkvepkscdkthtcppcpcchprlslhrpaledlllgsean | |
| | ltctltglrdedpevkfnwyvdgvevhnaktkpreeqycgcysvssvlpgcaqpwnhgetftct | |
| | aahpelktpltanitksgntfrpevhllpppseelalnelvtltclargfspkdvlvrwlqgsq | |
| | elprekyltwasrqepsqgtttfavtsilrvaaedwkkgdtfscmvghealplaftqktidrla | |
| 36 | evqlvesggglvqpggslrlscaasgfnikdtyihwvrqapgkglewvariyptngytryadsv | 2470 |
| | kgrftisadtskntaylqmnslraedtavyycsrwggdgfyamdywgqgtlvtvssastkgpsv | |
| | fplapsskstsggtaalgclvkdyfpepvtvswnsgaltsgvhtfpavlqssglyslssvvtvp | |
| | ssslgtqtyicnvnhkpsntkvdkkvepkscdkthtcppcpcchprlslhrpaledlllgsean | |
| | ltctltglrdedpevkfnwyvdgvevhnaktkpreeqycgcysvssvlpgcaqpwnhgetftct | |
| | aahpelpapiektitksgntfrpevhllpppseelalnelvtltclargfspkdvlvrwlqgsq | |
| | elprekyltwasrqepsqgtttfavtsilrvaaedwkkgdtfscmvghealplaftqktidrla | |
| 37 | evqlvesggglvqpggslrlscaasgfnikdtyihwvrqapgkglewvariyptngytryadsv | 2471 |
| | kgrftisadtskntaylqmnslraedtavyycsrwggdgfyamdywgqgtlvtvssastkgpsv | |
| | fplapsskstsggtaalgclvkdyfpepvtvswnsgaltsgvhtfpavlqssglyslssvvtvp | |
| | ssslgtqtyicnvnhkpsntkvdkkvepkscdkthtcppcphprlslhrpaledlllgseanlt | |
| | ctltglrdedpevkfnwyvdgvevhnaktkpreeqynstyrvvsvlpgcaqpwnhgkeykckvs | |
| | nkalpapiektitksgntfrpevhllpppseelalnelvtltclargfspkdvlvrwlqgsqel | |
| | prekyltwasrqepsqgtttfavtsilrvaaedwkkgdtfscmvghealplaftqktidrla | |
| 38 | evqlvesggglvqpggslrlscaasgfnikdtyihwvrqapgkglewvariyptngytryadsv | 2472 |
| | kgrftisadtskntaylqmnslraedtavyycsrwggdgfyamdywgqgtlvtvssastkgpsv | |
| | fplapsskstsggtaalgclvkdyfpepvtvswnsgaltsgvhtfpavlqssglyslssvvtvp | |
| | ssslgtqtyicnvnhkpsntkvdkkvepkscdkthtcppcpapellggpsvflfrpaledlllg | |
| | seanvtcvvvdvshedpevkfnwyvdgvevhnaktkpreeqycgcysvssvlpgcaqpwnhget | |
| | ftctaahpelpapiektitksgntfrpevhllpppseelalnelvtltclargfspkdvivrwl | |
| | qgsqelprekyltwasrqepsqgtttfavtsilrvaaedwkkgdtfscmvghealplaftqkti | |
| | drla | |
| 39 | evqlvesggglvqpggslrlscaasgfnikdtyihwvrqapgkglewvariyptngytryadsv | 2473 |
| | kgrftisadtskntaylqmnslraedtavyycsrwggdgfyamdywgqgtlvtvssastkgpsv | |
| | fplapsskstsggtaalgclvkdyfpepvtvswnsgaltsgvhtfpavlqssglyslssvvtvp | |
| | ssslgtqtyicnvnhkpsntkvdkkvepkscdkthtcppcpapellggpsvflfrpaledlllg | |
| | seanvtcvvvdvshasgatftwtpssgksavqgpperdlnstyrvvsvlpgcaqpwnhgkeykc | |
| | kvsnkalktpltanitksgntfrpevhllpppseelalnelvtltclargfspkdvlvrwlqgs | |
| | qelprekyltwasrqepsqgtttfavtsilrvaaedwkkgdtfscmvghealplaftqktidrl | |
| | a | |
| 40 | evqlvesggglvqpggslrlscaasgfnikdtyihwvrqapgkglewvariyptngytryadsv | 2474 |
| | kgrftisadtskntaylqmnslraedtavyycsrwggdgfyamdywgqgtlvtvssastkgpsv | |
| | fplapsskstsggtaalgclvkdyfpepvtvswnsgaltsgvhtfpavlqssglyslssvvtvp | |
| | ssslgtqtyicnvnhkpsntkvdkkvepkscdkthtcppcpapellggpsvflfrpaledlllg | |
| | seanvtcvvvdvshasgatftwtpssgksavqgpperdlcgcysvssvlpgcaqpwnhgetftc | |
| | taahpelktpitanitksgntfrpevhllpppseelalnelvtltclargfspkdvlvrwlqgs | |
| | qelprekyltwasrqepsqgtttfavtsilrvaaedwkkgdtfscmvghealplaftqktidrl | |
| | a | |
| 41 | evqlvesggglvqpggslrlscaasgfnikdtyihwvrqapgkglewvariyptngytryadsv | 2475 |
| | kgrftisadtskntaylqmnslraedtavyycsrwggdgfyamdywgqgtlvtvssastkgpsv | |
| | fplapsskstsggtaalgclvkdyfpepvtvswnsgaltsgvhtfpavlqssglyslssvvtvp | |
| | ssslgtqtyicnvnhkpsntkvdkkvepkscdkthtcppcphprlslhrpaledlllgseanlt | |
| | ctltglrdasgatftwtpssgksavqgpperdlnstyrvvsvlpgcaqpwnhgkeykckvsnka | |
| | iktpltanitksgntfrpevhllpppseelalnelvtltclargfspkdvlvrwlqgsqelpre | |
| | kyltwasrqepsqgtttfavtsilrvaaedwkkgdtfscmvghealplaftqktidrla | |
| 42 | evqlvesggglvqpggslrlscaasgfnikdtyihwvrqapgkglewvariyptngytryadsv | 2476 |
| | kgrftisadtskntaylqmnslraedtavyycsrwggdgfyamdywgqgtlvtvssastkgpsv | |
| | fplapsskstsggtaalgclvkdyfpepvtvswnsgaltsgvhtfpavlqssglyslssvvtvp | |
| | ssslgtqtyicnvnhkpsntkvdkkvepkscdkthtcppcpapellggpsvflfrpaledlllg | |
| | seanvtcvvvdvshasgatftwtpssvevhnaktkpreeqynstyrvvsvlpgcaqpwnhgetf | |
| | tctaahpelktpltanitksgntfrpevhllpppseelalnelvtltclargfspkdvlvrwlq | |
| | gsqelprekyltwasrqepsqgtttfavtsilrvaaedwkkgdtfscmvghealplaftqktid | |
| | rla | |
| 43 | evqlvesggglvqpggslrlscaasgfnikdtyihwvrqapgkglewvariyptngytryadsv | 2477 |
| | kgrftisadtskntaylqmnslraedtavyycsrwggdgfyamdywgqgtlvtvssastkgpsv | |
| | fplapsskstsggtaalgclvkdyfpepvtvswnsgaltsgvhtfpavlqssglyslssvvtvp | |
| | ssslgtqtyicnvnhkpsntkvdkkvepkscdkthtcppcpcchprlslhrpaledlllgsean | |
| | ltctltglrdedpevkfnwyvdggksavqgpperdlcgcysvssvlpgcaqpwnhgkeykckvs | |
| | nkalpapiektitksgntfrpevhllpppseelalnelvtltclargfspkdvlvrwlqgsqel | |
| | prekyltwasrqepsqgtttfavtsilrvaaedwkkgdtfscmvghealplaftqktidrla | |
| 44 | evqlvesggglvqpggslrlscaasgfnikdtyihwvrqapgkglewvariyptngytryadsv | 2478 |
| | kgrftisadtskntaylqmnslraedtavyycsrwggdgfyamdywgqgtlvtvssastkgpsv | |
| | fplapsskstsggtaalgclvkdyfpepvtvswnsgaltsgvhtfpavlqssglyslssvvtvp | |
| | ssslgtqtyicnvnhkpsntkvdkkvepkscdkthtcppcpapellggpslslhrpaledlllg | |
| | seanltctlvdvshedpevkftwtpssgksavtkpreeqynstyrvssvlpgcaqpwnhgetft | |
| | ctvsnkalpapltanitksgntfrpevhllpppseelalnelvtltclargfspkdvlvrwlqg | |
| | sqelprekyltwasrqepsqgtttfavtsilrvaaedwkkgdtfscmvghealplaftqktidr | |
| | la | |
| 45 | evqlvesggglvqpggslrlscaasgfnikdtyihwvrqapgkglewvariyptngytryadsv | 2479 |
| | kgrftisadtskntaylqmnslraedtavyycsrwggdgfyamdywgqgtlvtvssastkgpsv | |
| | fplapsskstsggtaalgclvkdyfpepvtvswnsgaltsgvhtfpavlqssglyslssvvtvp | |
| | ssslgtqtyicnvnhkpsntkvdkkvepkscdkthtcppcpcchprvflfrpaledlllgsean | |
| | vtcvvtglrdasgatfnwyvdgvevhnakqgpperdicgcysvvsvlpgcaqpwnhgkeykcka | |
| | ahpelktpiektitksgntfrpevhllpppseelalnelvtltclargfspkdvlvrwlqgsqe | |
| | lprekyltwasrqepsqgtttfavtsilrvaaedwkkgdtfscmvghealplaftqktidrla | |
| 46 | evqlvesggglvqpggslrlscaasgfnikdtyihwvrqapgkglewvariyptngytryadsv | 2459 |
| | kgrftisadtskntaylqmnslraedtavyycsrwggdgfyamdywgqgtlvtvssastkgpsv | |
| | fplapsskstsggtaalgclvkdyfpepvtvswnsgaltsgvhtfpavlqssglyslssvvtvp | |
| | ssslgtqtyicnvnhkpsntkvdkkvepkscdkthtcppcphprlslhrpaledlllgseanlt | |
| | ctltglrdasgatftwtpssgksavqgpperdicgcysvssvlpgcaqpwnhgetftetaahpe | |
| | lktpltaniskagqprrpqvytlppsrdeltlknqvsltclvkgfypsdilvrwlqgsqelpre | |
| | nykttppvldsdqgtgsfflyskltvdksrwqqgntfscmvghealplaftqktlslsp | |
| 47 | evqlvesggglvqpggslrlscaasgfnikdtyihwvrqapgkglewvariyptngytryadsv | 2460 |
| | kgrftisadtskntaylqmnslraedtavyycsrwggdgfyamdywgqgtlvtvssastkgpsv | |
| | fplapsskstsggtaalgclvkdyfpepvtvswnsgaltsgvhtfpavlqssglyslssvvtvp | |
| | ssslgtqtyicnvnhkpsntkvdkkvepkscdkthtcppcphprlslhrpaledlllgseanlt | |
| | ctltglrdasgatftwtpssgksavqgpperdicgcysvssvlpgcaqpwnhgetftetaahpe | |
| | iktpltaniskagqprepevytlppsrdeltlknqvsltclvkgfypsdilvrwlqgsqelpre | |
| | nykttppvldsdqgtgsfflyskltvdksrwqqgntfscmvghealplaftqktlslsp | |
| 48 | evqlvesggglvqpggslrlscaasgfnikdtyihwvrqapgkglewvariyptngytryadsv | 2461 |
| | kgrftisadtskntaylqmnslraedtavyycsrwggdgfyamdywgqgtlvtvssastkgpsv | |
| | fplapsskstsggtaalgclvkdyfpepvtvswnsgaltsgvhtfpavlqssglyslssvvtvp | |
| | ssslgtqtyicnvnhkpsntkvdkkvepkscdkthtcppcphprlslhrpaledlllgseanlt | |
| | ctltglrdasgatftwtpssgksavqgpperdicgcysvssvlpgcaqpwnhgetftetaahpe | |
| | iktpltaniskagqprrpevytlppsrdeltlknqvsltclvkgfypsdilvrwlqgsqelpre | |
| | nykttppvldsdqgtgsfflyskltvdksrwqqgntfscmvghealplaftqktlslsp | |
| 49 | evqlvesggglvqpggslrlscaasgfnikdtyihwvrqapgkglewvariyptngytryadsv | 2564 |
| | kgrftisadtskntaylqmnslraedtavyycsrwggdgfyamdywgqgtlvtvssastkgpsv | |
| | fplapsskstsggtaalgclvkdyfpepvtvswnsgaltsgvhtfpavlqssglyslssvvtvp | |
| | ssslgtqtyicnvnhkpsntkvdkkvepkscdkthtcppcpapellggpsvflfrpaledlllg | |
| | seanvtcvvtglrdasgatfnwyvdgvevhnakqgpperdicgcysvvsvlpgcaqpwnhgkey | |
| | kckaahpelktpiektitksgntfrpevhllpppseelalnelvtltclargfspkdvlvrwlq | |
| | gsqelprekyltwasrqepsqgtttfavtsilrvaaedwkkgdtfscmvghealplaftqktid | |
| | ria | |
| 50 | evqlvesggglvqpggslrlscaasgfnikdtyihwvrqapgkglewvariyptngytryadsv | 2565 |
| | kgrftisadtskntaylqmnslraedtavyycsrwggdgfyamdywgqgtlvtvssastkgpsv | |
| | fplapsskstsggtaalgclvkdyfpepvtvswnsgaltsgvhtfpavlqssglyslssvvtvp | |
| | ssslgtqtyicnvnhkpsntkvdkkvepkscdkthtcppcpcchprvflfrpaledlllgsean | |
| | vtcvvtglrdedpevkfnwyvdgvevhnakqgpperdlcgcysvvsvlpgcaqpwnhgkeykck | |
| | aahpelktpiektitksgntfrpevhllpppseelalnelvtltclargfspkdvlvrwlqgsq | |
| | elprekyltwasrqepsqgtttfavtsilrvaaedwkkgdtfscmvghealplaftqktidrla | |
| 51 | evqlvesggglvqpggslrlscaasgfnikdtyihwvrqapgkglewvariyptngytryadsv | 2566 |
| | kgrftisadtskntaylqmnslraedtavyycsrwggdgfyamdywgqgtlvtvssastkgpsv | |
| | fplapsskstsggtaalgclvkdyfpepvtvswnsgaltsgvhtfpavlqssglyslssvvtvp | |
| | ssslgtqtyicnvnhkpsntkvdkkvepkscdkthtcppcpcchprvflfrpaledlllgsean | |
| | vtcvvtglrdasgatfnwyvdgvevhnaktkpreeqycgcysvvsvlpgcaqpwnhgkeykcka | |
| | ahpelktpiektitksgntfrpevhllpppseelalnelvtltclargfspkdvlvrwlqgsqe | |
| | lprekyltwasrqepsqgtttfavtsilrvaaedwkkgdtfscmvghealplaftqktidrla | |
| 52 | evqlvesggglvqpggslrlscaasgfnikdtyihwvrqapgkglewvariyptngytryadsv | 2567 |
| | kgrftisadtskntaylqmnslraedtavyycsrwggdgfyamdywgqgtlvtvssastkgpsv | |
| | fplapsskstsggtaalgclvkdyfpepvtvswnsgaltsgvhtfpavlqssglyslssvvtvp | |
| | ssslgtqtyicnvnhkpsntkvdkkvepkscdkthtcppcpcchprvflfrpaledlllgsean | |
| | vtcvvtglrdasgatfnwyvdgvevhnakqgpperdlcgcysvvsvlpgcaqpwnhgkeykckv | |
| | snkalktpiektitksgntfrpevhllpppseelalnelvtltclargfspkdvlvrwlqgsqe | |
| | lprekyltwasrqepsqgtttfavtsilrvaaedwkkgdtfscmvghealplaftqktidrla | |
| 53 | evqlvesggglvqpggslrlscaasgfnikdtyihwvrqapgkglewvariyptngytryadsv | 2568 |
| | kgrftisadtskntaylqmnslraedtavyycsrwggdgfyamdywgqgtlvtvssastkgpsv | |
| | fplapsskstsggtaalgclvkdyfpepvtvswnsgaltsgvhtfpavlqssglyslssvvtvp | |
| | ssslgtqtyicnvnhkpsntkvdkkvepkscdkthtcppcpcchprvflfrpaledlllgsean | |
| | vtcvvtglrdasgatfnwyvdgvevhnakqgpperdicgcysvvsvlpgcaqpwnhgkeykcka | |
| | ahpelpaplektitksgntfrpevhllpppseelalnelvtltclargfspkdvlvrwlqgsqe | |
| | lprekyltwasrqepsqgtttfavtsilrvaaedwkkgdtfscmvghealplaftqktidrla | |
| 54 | evqlvesggglvqpggslrlscaasgfnikdtyihwvrqapgkglewvariyptngytryadsv | 2569 |
| | kgrftisadtskntaylqmnslraedtavyycsrwggdgfyamdywgqgtlvtvssastkgpsv | |
| | fplapsskstsggtaalgclvkdyfpepvtvswnsgaltsgvhtfpavlqssglyslssvvtvp | |
| | ssslgtqtyicnvnhkpsntkvdkkvepkscdkthtcppcpapellggpsvflfrpaledlllg | |
| | seanvtcvvtglrdedpevkfnwyvdgvevhnaktkpreeqycgcysvvsvlpgcaqpwnhgke | |
| | ykckaahpelpaplektitksgntfrpevhllpppseelalnelvtltclargfspkdvlvrwl | |
| | qgsqelprekyltwasrqepsqgtttfavtsilrvaaedwkkgdtfscmvghealplaftqkti | |
| | drla | |
| 55 | evqlvesggglvqpggslrlscaasgfnikdtyihwvrqapgkglewvariyptngytryadsv | 2570 |
| | kgrftisadtskntaylqmnslraedtavyycsrwggdgfyamdywgqgtlvtvssastkgpsv | |
| | fplapsskstsggtaalgclvkdyfpepvtvswnsgaltsgvhtfpavlqssglyslssvvtvp | |
| | ssslgtqtyicnvnhkpsntkvdkkvepkscdkthtcppcpapellggpsvflfrpaledlllg | |
| | seanvtcvvtglrdedpevkfnwyvdgvevhnaktkpreeqycgcysvvsvlpgcaqpwnhgke | |
| | ykckvsnkalpapiektitksgntfrpevhllpppseelalnelvtltclargfspkdvlvrwl | |
| | qgsqelprekyltwasrqepsqgtttfavtsilrvaaedwkkgdtfscmvghealplaftqkti | |
| | drla | |
| 56 | evqlvesggglvqpggslrlscaasgfnikdtyihwvrqapgkglewvariyptngytryadsv | 2571 |
| | kgrftisadtskntaylqmnslraedtavyycsrwggdgfyamdywgqgtlvtvssastkgpsv | |
| | fplapsskstsggtaalgclvkdyfpepvtvswnsgaltsgvhtfpavlqssglyslssvvtvp | |
| | ssslgtqtyicnvnhkpsntkvdkkvepkscdkthtcppcpcchprvflfrpaledlllgsean | |
| | vtcvvtglrdedpevkfnwyvdgvevhnaktkpreeqycgcysvvsvlpgcaqpwnhgkeykck | |
| | aahpelpapiektitksgntfrpevhllpppseelalnelvtltclargfspkdvlvrwlqgsq | |
| | elprekyltwasrqepsqgtttfavtsilrvaaedwkkgdtfscmvghealplaftqktidrla | |
| 57 | evqlvesggglvqpggslrlscaasgfnikdtyihwvrqapgkglewvariyptngytryadsv | 2572 |
| | kgrftisadtskntaylqmnslraedtavyycsrwggdgfyamdywgqgtlvtvssastkgpsv | |
| | fplapsskstsggtaalgclvkdyfpepvtvswnsgaltsgvhtfpavlqssglyslssvvtvp | |
| | ssslgtqtyicnvnhkpsntkvdkkvepkscdkthtcppcpcchprvflfrpaledlllgsean | |
| | vtcvvtglrdedpevkfnwyvdgvevhnaktkpreeqycgcysvvsvlpgcaqpwnhgkeykck | |
| | vsnkalpapiektitksgntfrpevhllpppseelalnelvtltclargfspkdvlvrwlqgsq | |
| | elprekyltwasrqepsqgtttfavtsilrvaaedwkkgdtfscmvghealplaftqktidrla | |
| 58 | evqlvesggglvqpggslrlscaasgfnikdtyihwvrqapgkglewvariyptngytryadsv | 2576 |
| | kgrftisadtskntaylqmnslraedtavyycsrwggdgfyamdywgqgtlvtvssastkgpsv | |
| | fplapsskstsggtaalgclvkdyfpepvtvswnsgaltsgvhtfpavlqssglyslssvvtvp | |
| | ssslgtqtyicnvnhkpsntkvdkkvepkscdkthtcppcphprlslhrpaledlllgseanlt | |
| | ctltglrdasgatftwtpssgksavqgpperdicgcysvssvlpgcaqpwnhgetftetaahpe | |
| | iktpltaniskagqprepqvytlppsrdeltlnelvtltclargfspkdvlvrwlqgsqelpre | |
| | kyltwasrqepsqgtttfavtsilrvaaedwkkgdtfscmvghealplaftqktidrla | |
| 59 | evqlvesggglvqpggslrlscaasgfnikdtyihwvrqapgkglewvariyptngytryadsv | 2577 |
| | kgrftisadtskntaylqmnslraedtavyycsrwggdgfyamdywgqgtlvtvssastkgpsv | |
| | fplapsskstsggtaalgclvkdyfpepvtvswnsgaltsgvhtfpavlqssglyslssvvtvp | |
| | ssslgtqtyicnvnhkpsntkvdkkvepkscdkthtcppcphprlslhrpaledlllgseanlt | |
| | ctltglrdasgatftwtpssgksavqgpperdicgcysvssvlpgcaqpwnhgetftetaahpe | |
| | iktpltaniskagqprepevhllpppseelaknqvsltclvkgfypkdvlvrwlqgsqelprek | |
| | yltwasrqepsqgtttfavtsilrvaaedwkkgdtfscmvghealplaftqktidrla | |
| 60 | evqlvesggglvqpggslrlscaasgfnikdtyihwvrqapgkglewvariyptngytryadsv | 2578 |
| | kgrftisadtskntaylqmnslraedtavyycsrwggdgfyamdywgqgtlvtvssastkgpsv | |
| | fplapsskstsggtaalgclvkdyfpepvtvswnsgaltsgvhtfpavlqssglyslssvvtvp | |
| | ssslgtqtyicnvnhkpsntkvdkkvepkscdkthtcppcphprlslhrpaledlllgseanlt | |
| | ctltglrdasgatftwtpssgksavqgpperdicgcysvssvlpgcaqpwnhgetftctaahpe | |
| | iktpltaniskagqprepevhllpppseelalnelvtltclargfspsdiavewesngqpenky | |
| | ltwasrqepsqgtttfavtsilrvaaedwkkgdtfscmvghealplaftqktidrla | |
| 61 | evqlvesggglvqpggslrlscaasgfnikdtyihwvrqapgkglewvariyptngytryadsv | 2579 |
| | kgrftisadtskntaylqmnslraedtavyycsrwggdgfyamdywgqgtlvtvssastkgpsv | |
| | fplapsskstsggtaalgclvkdyfpepvtvswnsgaltsgvhtfpavlqssglyslssvvtvp | |
| | ssslgtqtyicnvnhkpsntkvdkkvepkscdkthtcppcphprlslhrpaledlllgseanlt | |
| | ctltglrdasgatftwtpssgksavqgpperdicgcysvssvlpgcaqpwnhgetftetaahpe | |
| | lktpltaniskagqprepevhllpppseelalnelvtltclargfspsdiavewlqgsqelpre | |
| | kyltwasrqepsqgtttfavtsilrvaaedwkkgdtfscmvghealplaftqktidrla | |
| 62 | evqlvesggglvqpggslrlscaasgfnikdtyihwvrqapgkglewvariyptngytryadsv | 2580 |
| | kgrftisadtskntaylqmnslraedtavyycsrwggdgfyamdywgqgtlvtvssastkgpsv | |
| | fplapsskstsggtaalgclvkdyfpepvtvswnsgaltsgvhtfpavlqssglyslssvvtvp | |
| | ssslgtqtyicnvnhkpsntkvdkkvepkscdkthtcppcphprlslhrpaledlllgseanlt | |
| | ctltglrdasgatftwtpssgksavqgpperdlcgcysvssvlpgcaqpwnhgetftctaahpe | |
| | iktpltaniskagqprepevhllpppseelalnelvtltclargfspkdvlvrwesngqpenky | |
| | ltwasrqepsqgtttfavtsilrvaaedwkkgdtfscmvghealplaftqktidrla | |
| 63 | evqlvesggglvqpggslrlscaasgfnikdtyihwvrqapgkglewvariyptngytryadsv | 2581 |
| | kgrftisadtskntaylqmnslraedtavyycsrwggdgfyamdywgqgtlvtvssastkgpsv | |
| | fplapsskstsggtaalgclvkdyfpepvtvswnsgaltsgvhtfpavlqssglyslssvvtvp | |
| | ssslgtqtyicnvnhkpsntkvdkkvepkscdkthtcppcphprlslhrpaledlllgseanlt | |
| | ctltglrdasgatftwtpssgksavqgpperdicgcysvssvlpgcaqpwnhgetftetaahpe | |
| | iktpltaniskagqprepevhllpppseelalnelvtitclargfspkdvlvrwlqgsqelpre | |
| | nykttppvldsdqgtttfavtsilrvaaedwkkgdtfscmvghealplaftqktidrla | |
| 64 | evqlvesggglvqpggslrlscaasgfnikdtyihwvrqapgkglewvariyptngytryadsv | 2582 |
| | kgrftisadtskntaylqmnslraedtavyycsrwggdgfyamdywgqgtlvtvssastkgpsv | |
| | fplapsskstsggtaalgclvkdyfpepvtvswnsgaltsgvhtfpavlqssglyslssvvtvp | |
| | ssslgtqtyicnvnhkpsntkvdkkvepkscdkthtcppcphprlslhrpaledlllgseanlt | |
| | ctltglrdasgatftwtpssgksavqgpperdicgcysvssvlpgcaqpwnhgetftctaahpe | |
| | lktpltaniskagqprepevhllpppseelalnelvtitclargfspkdvlvrwlqgsqelpre | |
| | kyltwasrqepsqgtgsfflyskltvdaedwkkgdtfscmvghealplaftqktidrla | |
| 65 | evqlvesggglvqpggslrlscaasgfnikdtyihwvrqapgkglewvariyptngytryadsv | 2583 |
| | kgrftisadtskntaylqmnslraedtavyycsrwggdgfyamdywgqgtlvtvssastkgpsv | |
| | fplapsskstsggtaalgclvkdyfpepvtvswnsgaltsgvhtfpavlqssglyslssvvtvp | |
| | ssslgtqtyicnvnhkpsntkvdkkvepkscdkthtcppcphprlslhrpaledlllgseanlt | |
| | ctltglrdasgatftwtpssgksavqgpperdicgcysvssvlpgcaqpwnhgetftetaahpe | |
| | lktpltaniskagqprepevhllpppseelalnelvtitclargfspkdvlvrwlqgsqelpre | |
| | kyltwasrqepsqgtttfavtsilrvaksrwqqgntfscmvghealplaftqktidrla | |
| 66 | evqlvesggglvqpggslrlscaasgfnikdtyihwvrqapgkglewvariyptngytryadsv | 2584 |
| | kgrftisadtskntaylqmnslraedtavyycsrwggdgfyamdywgqgtlvtvssastkgpsv | |
| | fplapsskstsggtaalgclvkdyfpepvtvswnsgaltsgvhtfpavlqssglyslssvvtvp | |
| | ssslgtqtyicnvnhkpsntkvdkkvepkscdkthtcppcphprlslhrpaledlllgseanlt | |
| | ctltglrdasgatftwtpssgksavqgpperdicgcysvssvlpgcaqpwnhgetftetaahpe | |
| | lktpltaniskagqprepevhllpppseelalnelvtitclargfspkdvlvrwlqgsqelpre | |
| | kyltwasrqepsqgtttfavtsilrvaaedwkkgdvfscsvmhealplaftqktidrla | |
| 67 | evqlvesggglvqpggslrlscaasgfnikdtyihwvrqapgkglewvariyptngytryadsv | 2585 |
| | kgrftisadtskntaylqmnslraedtavyycsrwggdgfyamdywgqgtlvtvssastkgpsv | |
| | fplapsskstsggtaalgclvkdyfpepvtvswnsgaltsgvhtfpavlqssglyslssvvtvp | |
| | ssslgtqtyicnvnhkpsntkvdkkvepkscdkthtcppcphprlslhrpaledlllgseanlt | |
| | ctltglrdasgatftwtpssgksavqgpperdicgcysvssvlpgcaqpwnhgetftetaahpe | |
| | lktpltaniskagqprepevhllpppseelalnelvtitclargfspkdvlvrwlqgsqelpre | |
| | kyltwasrqepsqgtttfavtsilrvaaedwkkgdtfscmvghealhnhytqktidrla | |
| 68 | evqlvesggglvqpggslrlscaasgfnikdtyihwvrqapgkglewvariyptngytryadsv | 2586 |
| | kgrftisadtskntaylqmnslraedtavyycsrwggdgfyamdywgqgtlvtvssastkgpsv | |
| | fplapsskstsggtaalgclvkdyfpepvtvswnsgaltsgvhtfpavlqssglyslssvvtvp | |
| | ssslgtqtyicnvnhkpsntkvdkkvepkscdkthtcppcphprlslhrpaledlllgseanlt | |
| | ctltglrdasgatftwtpssgksavqgpperdicgcysvssvlpgcaqpwnhgetftetaahpe | |
| | lktpltaniskagqprepevhllpppseelalnelvtitclargfspkdvlvrwlqgsqelpre | |
| | kyltwasrqepsqgtttfavtsilrvaaedwkkgdtfscmvghealplaftqkslslsp | |
| 69 | evqlvesggglvqpggslrlscaasgfnikdtyihwvrqapgkglewvariyptngytryadsv | 2587 |
| | kgrftisadtskntaylqmnslraedtavyycsrwggdgfyamdywgqgtlvtvssastkgpsv | |
| | fplapsskstsggtaalgclvkdyfpepvtvswnsgaltsgvhtfpavlqssglyslssvvtvp | |
| | ssslgtqtyicnvnhkpsntkvdkkvepkscdkthtcppcphprlslhrpaledlllgseanlt | |
| | ctltglrdasgatftwtpssgksavqgpperdicgcysvssvlpgcaqpwnhgetftetaahpe | |
| | iktpltaniskagqprepevhllppsrdeltknqvsltclargfspkdvlvrwlqgsqelpren | |
| | yktwasrqepsqgtttfavtskltvdksrwqqgnvfscmvghealplaftqktlslsp | |
| 70 | evqlvesggglvqpggslrlscaasgfnikdtyihwvrqapgkglewvariyptngytryadsv | 2588 |
| | kgrftisadtskntaylqmnslraedtavyycsrwggdgfyamdywgqgtlvtvssastkgpsv | |
| | fplapsskstsggtaalgclvkdyfpepvtvswnsgaltsgvhtfpavlqssglyslssvvtvp | |
| | ssslgtqtyicnvnhkpsntkvdkkvepkscdkthtcppcphprlslhrpaledlllgseanlt | |
| | ctltglrdasgatftwtpssgksavqgpperdicgcysvssvlpgcaqpwnhgetftetaahpe | |
| | lktpltaniskagqprepqvytlpppseelalnelvtitclvkgfypsdilvrwlqgsqelpre | |
| | kylttppvldsdgsfflysilrvaaedwkkgdtfscmvghealplaftqktidrla | |
| 71 | evqlvesggglvqpggslrlscaasgfnikdtyihwvrqapgkglewvariyptngytryadsv | 2591 |
| | kgrftisadtskntaylqmnslraedtavyycsrwggdgfyamdywgqgtlvtvssastkgpsv | |
| | fplapsskstsggtaalgclvkdyfpepvtvswnsgaltsgvhtfpavlqssglyslssvvtvp | |
| | ssslgtqtyicnvnhkpsntkvdkkvepkscdkthtcppcphprlslhrpaledlllgseanlt | |
| | ctltglrdasgatftwtpssgksavqgpperdlcgcysvssvlpgcaqpwnhgetftctaahpe | |
| | lktpltanitksgntfrpevhllpppseelalnelvtltclargfspkdvlvrwlqgsqelpre | |
| | kyltwasrqepsqgtttfavtsilrvaaedwkkgdtfscmvghealplhytqktidrla | |
| 72 | evqlvesggglvqpggslrlscaasgfnikdtyihwvrqapgkglewvariyptngytryadsv | 2592 |
| | kgrftisadtskntaylqmnslraedtavyycsrwggdgfyamdywgqgtlvtvssastkgpsv | |
| | fplapsskstsggtaalgclvkdyfpepvtvswnsgaltsgvhtfpavlqssglyslssvvtvp | |
| | ssslgtqtyicnvnhkpsntkvdkkvepkscdkthtcppcphprlslhrpaledlllgseanlt | |
| | ctltglrdasgatftwtpssgksavqgpperdicgcysvssvlpgcaqpwnhgetftetaahpe | |
| | iktpltanitksgntfrpevhllpppseelalnelvtltclargfspkdvlvrwlqgsqelpre | |
| | kyltwasrqepsqgtttfavtsilrvaaedwkkgdtfscmvghealhnhytqktidrla | |
| 73 | evqlvesggglvqpggslrlscaasgfnikdtyihwvrqapgkglewvariyptngytryadsv | 2683 |
| | kgrftisadtskntaylqmnslraedtavyycsrwggdgfyamdywgqgtlvtvssastkgpsv | |
| | fplapsskstsggtaalgclvkdyfpepvtvswnsgaltsgvhtfpavlqssglyslssvvtvp | |
| | ssslgtqtyicnvnhkpsntkvdkkvepkscdkthtcppcpcchprvflfrpaledlllgsean | |
| | vtcvvvdvshedpevkfnwyvdgvevhnaktkpreeqycgcysvvsvlpgcaqpwnhgkeykck | |
| | aahpelpapiektitksgntfrpevhllpppseelalnelvtltclargfspkdvlvrwlqgsq | |
| | elprekyltwasrqepsqgtttfavtsilrvaaedwkkgdtfscmvghealplaftqktidrla | |
| 74 | evqlvesggglvqpggslrlscaasgfnikdtyihwvrqapgkglewvariyptngytryadsv | 2684 |
| | kgrftisadtskntaylqmnslraedtavyycsrwggdgfyamdywgqgtlvtvssastkgpsv | |
| | fplapsskstsggtaalgclvkdyfpepvtvswnsgaltsgvhtfpavlqssglyslssvvtvp | |
| | ssslgtqtyicnvnhkpsntkvdkkvepkscdkthtcppcpcchprvflfrpaledlllgsean | |
| | vtcvvvdvshedpevkfnwyvdgvevhnaktkpreeqycgcysvvsvlpgcaqpwnhgkeykck | |
| | vsnkalpapiektitksgntfrpevhllpppseelalnelvtltclargfspkdvlvrwlqgsq | |
| | elprekyltwasrqepsqgtttfavtsilrvaaedwkkgdtfscmvghealplaftqktidrla | |
| 75 | evqlvesggglvqpggslrlscaasgfnikdtyihwvrqapgkglewvariyptngytryadsv | 2685 |
| | kgrftisadtskntaylqmnslraedtavyycsrwggdgfyamdywgqgtlvtvssastkgpsv | |
| | fplapsskstsggtaalgclvkdyfpepvtvswnsgaltsgvhtfpavlqssglyslssvvtvp | |
| | ssslgtqtyicnvnhkpsntkvdkkvepkscdkthtcppcpcchprvflfrpaledlllgsean | |
| | vtcvvtglrdedpevkfnwyvdgvevhnaktkpreeqynstyrvvsvlpgcaqpwnhgkeykck | |
| | aahpelpapiektitksgntfrpevhllpppseelalnelvtltclargfspkdvlvrwlqgsq | |
| | elprekyltwasrqepsqgtttfavtsilrvaaedwkkgdtfscmvghealplaftqktidrla | |
| 76 | evqlvesggglvqpggslrlscaasgfnikdtyihwvrqapgkglewvariyptngytryadsv | 2686 |
| | kgrftisadtskntaylqmnslraedtavyycsrwggdgfyamdywgqgtlvtvssastkgpsv | |
| | fplapsskstsggtaalgclvkdyfpepvtvswnsgaltsgvhtfpavlqssglyslssvvtvp | |
| | ssslgtqtyicnvnhkpsntkvdkkvepkscdkthtcppcpcchprvflfrpaledlllgsean | |
| | vtcvvtglrdedpevkfnwyvdgvevhnaktkpreeqynstyrvvsvlpgcaqpwnhgkeykck | |
| | vsnkalpapiektitksgntfrpevhllpppseelalnelvtltclargfspkdvlvrwlqgsq | |
| | elprekyltwasrqepsqgtttfavtsilrvaaedwkkgdtfscmvghealplaftqktidrla | |
| 77 | evqlvesggglvqpggslrlscaasgfnikdtyihwvrqapgkglewvariyptngytryadsv | 2687 |
| | kgrftisadtskntaylqmnslraedtavyycsrwggdgfyamdywgqgtlvtvssastkgpsv | |
| | fplapsskstsggtaalgclvkdyfpepvtvswnsgaltsgvhtfpavlqssglyslssvvtvp | |
| | ssslgtqtyicnvnhkpsntkvdkkvepkscdkthtcppcpapellggpsvflfrpaledlllg | |
| | seanvtcvvtglrdedpevkfnwyvdgvevhnaktkpreeqynstyrvvsvlpgcaqpwnhgke | |
| | ykekaahpelpapiektitksgntfrpevhllpppseelalnelvtltclargfspkdvivrwl | |
| | qgsqelprekyltwasrqepsqgtttfavtsilrvaaedwkkgdtfscmvghealplaftqkti | |
| | drla | |
| 78 | evqlvesggglvqpggslrlscaasgfnikdtyihwvrqapgkglewvariyptngytryadsv | 2688 |
| | kgrftisadtskntaylqmnslraedtavyycsrwggdgfyamdywgqgtlvtvssastkgpsv | |
| | fplapsskstsggtaalgclvkdyfpepvtvswnsgaltsgvhtfpavlqssglyslssvvtvp | |
| | ssslgtqtyicnvnhkpsntkvdkkvepkscdkthtcppcpapellggpsvflfrpaledlllg | |
| | seanvtcvvtglrdedpevkfnwyvdgvevhnaktkpreeqynstyrvvsvlpgcaqpwnhgke | |
| | ykckvsnkalpapiektitksgntfrpevhllpppseelalnelvtltclargfspkdvivrwl | |
| | qgsqelprekyltwasrqepsqgtttfavtsilrvaaedwkkgdtfscmvghealplaftqkti | |
| | drla | |
| 79 | evqlvesggglvqpggslrlscaasgfnikdtyihwvrqapgkglewvariyptngytryadsv | 2689 |
| | kgrftisadtskntaylqmnslraedtavyycsrwggdgfyamdywgqgtlvtvssastkgpsv | |
| | fplapsskstsggtaalgclvkdyfpepvtvswnsgaltsgvhtfpavlqssglyslssvvtvp | |
| | ssslgtqtyicnvnhkpsntkvdkkvepkscdkthtcppcpcchprvflfrpaledlllgsean | |
| | vtcvvtglrdedpevkfnwyvdgvevhnaktkpreeqycgcysvvsvltvlhqdwlngkeykck | |
| | aahpelpapiektitksgntfrpevhllpppseelalnelvtltclargfspkdvlvrwlqgsq | |
| | elprekyltwasrqepsqgtttfavtsilrvaaedwkkgdtfscmvghealplaftqktidrla | |
| 80 | evqlvesggglvqpggslrlscaasgfnikdtyihwvrqapgkglewvariyptngytryadsv | 2696 |
| | kgrftisadtskntaylqmnslraedtavyycsrwggdgfyamdywgqgtlvtvssastkgpsv | |
| | fplapsskstsggtaalgclvkdyfpepvtvswnsgaltsgvhtfpavlqssglyslssvvtvp | |
| | ssslgtqtyicnvnhkpsntkvdkkvepkscdkthtcppcpcchprlslhrpaledlllgsean | |
| | ltctltglrdasgatftwtpssgksavqgpperdicgcysvssvlpgcaqpwnhgetftctaah | |
| | pelktpltaniskagqprepqvytlppsrdeltknqvsltclvkgfypkdvlvrwlqgsqelpr | |
| | enykttppvldsdqgtttfavtsilrvaksrwqqgntfscmvghealplaftqktlslsp | |
| 81 | evqlvesggglvqpggslrlscaasgfnikdtyihwvrqapgkglewvariyptngytryadsv | 2697 |
| | kgrftisadtskntaylqmnslraedtavyycsrwggdgfyamdywgqgtlvtvssastkgpsv | |
| | fplapsskstsggtaalgclvkdyfpepvtvswnsgaltsgvhtfpavlqssglyslssvvtvp | |
| | ssslgtqtyicnvnhkpsntkvdkkvepkscdkthtcppcpcchprlslhrpaledlllgsean | |
| | ltctltglrdasgatftwtpssgksavqgpperdlcgcysvssvlpgcaqpwnhgetftctaah | |
| | pelktpltaniskagqprepqvytlppsrdeltknqvsltclvkgfypsdilvrwlqgsqelpr | |
| | enykttppvldsdqgtttfavtsilrvaksrwqqgntfscmvghealplaftqktlslsp | |
| 82 | evqlvesggglvqpggslrlscaasgfnikdtyihwvrqapgkglewvariyptngytryadsv | 2698 |
| | kgrftisadtskntaylqmnslraedtavyycsrwggdgfyamdywgqgtlvtvssastkgpsv | |
| | fplapsskstsggtaalgclvkdyfpepvtvswnsgaltsgvhtfpavlqssglyslssvvtvp | |
| | ssslgtqtyicnvnhkpsntkvdkkvepkscdkthtcppcpcchprlslhrpaledlllgsean | |
| | ltctltglrdasgatftwtpssgksavqgpperdicgcysvssvlpgcaqpwnhgetftetaah | |
| | pelktpltaniskagqprepqvytlppsrdeltknqvsltclvkgfypsdiavrwlqgsqelpr | |
| | enykttppvldsdqgtttfavtsilrvaksrwqqgntfscmvghealplaftqktlslsp | |
| 83 | evqlvesggglvqpggslrlscaasgfnikdtyihwvrqapgkglewvariyptngytryadsv | 2699 |
| | kgrftisadtskntaylqmnslraedtavyycsrwggdgfyamdywgqgtlvtvssastkgpsv | |
| | fplapsskstsggtaalgclvkdyfpepvtvswnsgaltsgvhtfpavlqssglyslssvvtvp | |
| | ssslgtqtyicnvnhkpsntkvdkkvepkscdkthtcppcpcchprlslhrpaledlllgsean | |
| | ltctltglrdasgatftwtpssgksavqgpperdicgcysvssvlpgcaqpwnhgetftetaah | |
| | pelktpltaniskagqprepqvytlppsrdeltknqvsltclvkgfypkdvlvrwlqgsqelpr | |
| | enykttppvldsdttfavtsilrvaksrwqqgntfsemvghealplaftqktlslsp | |
| 84 | evqlvesggglvqpggslrlscaasgfnikdtyihwvrqapgkglewvariyptngytryadsv | 2700 |
| | kgrftisadtskntaylqmnslraedtavyycsrwggdgfyamdywgqgtlvtvssastkgpsv | |
| | fplapsskstsggtaalgclvkdyfpepvtvswnsgaltsgvhtfpavlqssglyslssvvtvp | |
| | ssslgtqtyicnvnhkpsntkvdkkvepkscdkthtcppcpcchprlslhrpaledlllgsean | |
| | ltctltglrdasgatftwtpssgksavqgpperdicgcysvssvlpgcaqpwnhgetftetaah | |
| | pelktpltaniskagqprepqvytlppsrdeltknqvsltclvkgfypkdvlvrwlqgsqelpr | |
| | enykttppvldsdgsfflysilrvaksrwqqgntfsemvghealplaftqktlslsp | |
| 85 | evqlvesggglvqpggslrlscaasgfnikdtyihwvrqapgkglewvariyptngytryadsv | 2701 |
| | kgrftisadtskntaylqmnslraedtavyycsrwggdgfyamdywgqgtlvtvssastkgpsv | |
| | fplapsskstsggtaalgclvkdyfpepvtvswnsgaltsgvhtfpavlqssglyslssvvtvp | |
| | ssslgtqtyicnvnhkpsntkvdkkvepkscdkthtcppcpcchprlslhrpaledlllgsean | |
| | ltctltglrdasgatftwtpssgksavqgpperdicgcysvssvlpgcaqpwnhgetftetaah | |
| | pelktpltaniskagqprepqvytlppsrdeltknqvsltclvkgfypsdiavrwlqgsqelpr | |
| | enykttppvldsdgsfflysilrvaksrwqqgntfsemvghealplaftqktlslsp | |
| 86 | evqlvesggglvqpggslrlscaasgfnikdtyihwvrqapgkglewvariyptngytryadsv | 2702 |
| | kgrftisadtskntaylqmnslraedtavyycsrwggdgfyamdywgqgtlvtvssastkgpsv | |
| | fplapsskstsggtaalgclvkdyfpepvtvswnsgaltsgvhtfpavlqssglyslssvvtvp | |
| | ssslgtqtyicnvnhkpsntkvdkkvepkscdkthtcppcpcchprlslhrpaledlllgsean | |
| | ltctltglrdasgatftwtpssgksavqgpperdicgcysvssvlpgcaqpwnhgetftetaah | |
| | pelktpltaniskagqprepqvytlppsrdeltknqvsltclvkgfypkdvlvrwlqgsqelpr | |
| | enykttppvldsdgsfflyskltvdksrwqqgntfsemvghealplaftqktlslsp | |
| 87 | evqlvesggglvqpggslrlscaasgfnikdtyihwvrqapgkglewvariyptngytryadsv | 2703 |
| | kgrftisadtskntaylqmnslraedtavyycsrwggdgfyamdywgqgtlvtvssastkgpsv | |
| | fplapsskstsggtaalgclvkdyfpepvtvswnsgaltsgvhtfpavlqssglyslssvvtvp | |
| | ssslgtqtyicnvnhkpsntkvdkkvepkscdkthtcppcpcchprlslhrpaledlllgsean | |
| | ltctltglrdasgatftwtpssgksavqgpperdicgcysvssvlpgcaqpwnhgetftetaah | |
| | pelktpltaniskagqpfepqvyllpppseelalnelvsltclakgfspkdvlvrwlqgsqelp | |
| | renykttasvqepsqgttsffvyskltvaaedwkkgdtfscmvghealplaftqksisrsp | |
| 88 | evqlvesggglvqpggslrlscaasgfnikdtyihwvrqapgkglewvariyptngytryadsv | 2704 |
| | kgrftisadtskntaylqmnslraedtavyycsrwggdgfyamdywgqgtlvtvssastkgpsv | |
| | fplapsskstsggtaalgclvkdyfpepvtvswnsgaltsgvhtfpavlqssglyslssvvtvp | |
| | ssslgtqtyicnvnhkpsntkvdkkvepkscdkthtcppcpcchprlslhrpaledlllgsean | |
| | ltctltglrdasgatftwtpssgksavqgpperdicgcysvssvlpgcaqpwnhgetftetaah | |
| | pelktpltaniskagqpfepqvyllppsrdeltknqvsltclakgfspkdvlvrwlqgsqelpr | |
| | enykttasvqepsqgttsffvyskltvaaedwkkgdtfscmvghealplaftqksisrsp | |
| 89 | evqlvesggglvqpggslrlscaasgfnikdtyihwvrqapgkglewvariyptngytryadsv | 2705 |
| | kgrftisadtskntaylqmnslraedtavyycsrwggdgfyamdywgqgtlvtvssastkgpsv | |
| | fplapsskstsggtaalgclvkdyfpepvtvswnsgaltsgvhtfpavlqssglyslssvvtvp | |
| | ssslgtqtyicnvnhkpsntkvdkkvepkscdkthtcppcpcchprlslhrpaledlllgsean | |
| | ltctltglrdasgatftwtpssgksavqgpperdicgcysvssvlpgcaqpwnhgetftetaah | |
| | pelktpltaniskagqprepqvyllppsrdeltknqvsltclakgfypkdvlvrwlqgsqelpr | |
| | enykttasvidsdgsffvyskltvaaedwkkgdtfscmvghealplaftqksisrsp | |
| 90 | evqlvesggglvqpggslrlscaasgfnikdtyihwvrqapgkglewvariyptngytryadsv | 2706 |
| | kgrftisadtskntaylqmnslraedtavyycsrwggdgfyamdywgqgtlvtvssastkgpsv | |
| | fplapsskstsggtaalgclvkdyfpepvtvswnsgaltsgvhtfpavlqssglyslssvvtvp | |
| | ssslgtqtyicnvnhkpsntkvdkkvepkscdkthtcppcpcchprlslhrpaledlllgsean | |
| | ltctltglrdasgatftwtpssgksavqgpperdlcgcysvssvlpgcaqpwnhgetftctaah | |
| | pelktpltaniskagqprepqvyllpppseelalnelvsltclakgfypkdvlvrwlqgsqelp | |
| | renykttasvldsdgsffvyskltvaaedwkkgdtfscmvghealplaftqksisrsp | |
| 91 | evqlvesggglvqpggslrlscaasgfnikdtyihwvrqapgkglewvariyptngytryadsv | 2707 |
| | kgrftisadtskntaylqmnslraedtavyycsrwggdgfyamdywgqgtlvtvssastkgpsv | |
| | fplapsskstsggtaalgclvkdyfpepvtvswnsgaltsgvhtfpavlqssglyslssvvtvp | |
| | ssslgtqtyicnvnhkpsntkvdkkvepkscdkthtcppcpcchprlslhrpaledlllgsean | |
| | ltctltglrdasgatftwtpssgksavqgpperdicgcysvssvlpgcaqpwnhgetftetaah | |
| | pelktpltaniskagqprepqvyllpppseelalnelvsltclakgfypkdvlvrwlqgsqelp | |
| | renykttasvldsdgsffvyskltvdksrwqqgnvfscmvghealplaftqksislsp | |
| 92 | evqlvesggglvqpggslrlscaasgfnikdtyihwvrqapgkglewvariyptngytryadsv | 2708 |
| | kgrftisadtskntaylqmnslraedtavyycsrwggdgfyamdywgqgtlvtvssastkgpsv | |
| | fplapsskstsggtaalgclvkdyfpepvtvswnsgaltsgvhtfpavlqssglyslssvvtvp | |
| | ssslgtqtyicnvnhkpsntkvdkkvepkscdkthtcppcpcchprlslhrpaledlllgsean | |
| | ltctltglrdasgatftwtpssgksavqgpperdicgcysvssvlpgcaqpwnhgetftetaah | |
| | pelktpltaniskagqpfepqvyllpppseelalnelvsltclakgfspkdvlvrwlqgsqelp | |
| | renykttasvqepsqgttsffvyskltvdksrwqqgnvfscmvghealplaftqksislsp | |
| 93 | evqlvesggglvqpggslrlscaasgfnikdtyihwvrqapgkglewvariyptngytryadsv | 2709 |
| | kgrftisadtskntaylqmnslraedtavyycsrwggdgfyamdywgqgtlvtvssastkgpsv | |
| | fplapsskstsggtaalgclvkdyfpepvtvswnsgaltsgvhtfpavlqssglyslssvvtvp | |
| | ssslgtqtyicnvnhkpsntkvdkkvepkscdkthtcppcpcchprlslhrpaledlllgsean | |
| | ltctltglrdasgatftwtpssgksavqgpperdicgcysvssvlpgcaqpwnhgetftetaah | |
| | pelktpltaniskagqpfepqvylippsrdeltknqvsltclakgfspkdvlvrwlqgsqelpr | |
| | enykttasvqepsqgttsffvyskltvdksrwqqgnvfscmvghealplaftqksislsp | |
| 94 | evqlvesggglvqpggslrlscaasgfnikdtyihwvrqapgkglewvariyptngytryadsv | 2710 |
| | kgrftisadtskntaylqmnslraedtavyycsrwggdgfyamdywgqgtlvtvssastkgpsv | |
| | fplapsskstsggtaalgclvkdyfpepvtvswnsgaltsgvhtfpavlqssglyslssvvtvp | |
| | ssslgtqtyicnvnhkpsntkvdkkvepkscdkthtcppcpcchprlslhrpaledlllgsean | |
| | ltctltglrdasgatftwtpssgksavqgpperdicgcysvssvlpgcaqpwnhgetftetaah | |
| | pelktpltaniskagqprepqvyllppsrdeltknqvsltclakgfypkdvlvrwlqgsqelpr | |
| | enykttasvidsdgsffvyskltvdksrwqqgnvfscmvghealplaftqksislsp | |
| 95 | evqlvesggglvqpggslrlscaasgfnikdtyihwvrqapgkglewvariyptngytryadsv | 2711 |
| | kgrftisadtskntaylqmnslraedtavyycsrwggdgfyamdywgqgtlvtvssastkgpsv | |
| | fplapsskstsggtaalgclvkdyfpepvtvswnsgaltsgvhtfpavlqssglyslssvvtvp | |
| | ssslgtqtyicnvnhkpsntkvdkkvepkscdkthtcppcpcchprlslhrpaledlllgsean | |
| | ltctltglrdasgatftwtpssgksavqgpperdicgcysvssvlpgcaqpwnhgetftetaah | |
| | pelktpltanitksgntfrpqvyllppsrdeltknqvsitelakgfspkdvlvrwlqgsqelpr | |
| | enykttasvqepsqgtttffvyskltvdksrwqqgnvfscmvghealplaftqksislsp | |
| 96 | evqlvesggglvqpggslrlscaasgfnikdtyihwvrqapgkglewvariyptngytryadsv | 2712 |
| | kgrftisadtskntaylqmnslraedtavyycsrwggdgfyamdywgqgtlvtvssastkgpsv | |
| | fplapsskstsggtaalgclvkdyfpepvtvswnsgaltsgvhtfpavlqssglyslssvvtvp | |
| | ssslgtqtyicnvnhkpsntkvdkkvepkscdkthtcppcpcchprlslhrpaledlllgsean | |
| | ltctltglrdasgatftwtpssgksavqgpperdicgcysvssvlpgcaqpwnhgetftetaah | |
| | pelktpltanitksgntfrpqvyllppsrdeltknqvsitelakgfspkdvlvrwlqgsqelpr | |
| | enykttasvqepsqgtttffvyskltvaaedwkkgdtfscmvghealplaftqksisrsp | |
| 97 | evqlvesggglvqpggslrlscaasgfnikdtyihwvrqapgkglewvariyptngytryadsv | 2713 |
| | kgrftisadtskntaylqmnslraedtavyycsrwggdgfyamdywgqgtlvtvssastkgpsv | |
| | fplapsskstsggtaalgclvkdyfpepvtvswnsgaltsgvhtfpavlqssglyslssvvtvp | |
| | ssslgtqtyicnvnhkpsntkvdkkvepkscdkthtcppcpcchprlslhrpaledlllgsean | |
| | ltctltglrdasgatftwtpssgksavqgpperdicgcysvssvlpgcaqpwnhgetftetaah | |
| | pelktpltanitksgntfrpqvyllpppseelalnelvsltclakgfspkdvlvrwlqgsqelp | |
| | renykttasvqepsqgtttffvyskltvdksrwqqgnvfscmvghealplaftqksislsp | |
| 98 | evqlvesggglvqpggslrlscaasgfnikdtyihwvrqapgkglewvariyptngytryadsv | 2714 |
| | kgrftisadtskntaylqmnslraedtavyycsrwggdgfyamdywgqgtlvtvssastkgpsv | |
| | fplapsskstsggtaalgclvkdyfpepvtvswnsgaltsgvhtfpavlqssglyslssvvtvp | |
| | ssslgtqtyicnvnhkpsntkvdkkvepkscdkthtcppcpcchprlslhrpaledlllgsean | |
| | ltctltglrdasgatftwtpssgksavqgpperdicgcysvssvlpgcaqpwnhgetftetaah | |
| | pelktpltanitksgntfrpqvyllpppseelalnelvsltclakgfspkdvlvrwlqgsqelp | |
| | renykttasvqepsqgtttffvyskltvaaedwkkgdtfscmvghealplaftqksisrsp | |
| 99 | evqlvesggglvqpggslrlscaasgfnikdtyihwvrqapgkglewvariyptngytryadsv | 2715 |
| | kgrftisadtskntaylqmnslraedtavyycsrwggdgfyamdywgqgtlvtvssastkgpsv | |
| | fplapsskstsggtaalgclvkdyfpepvtvswnsgaltsgvhtfpavlqssglyslssvvtvp | |
| | ssslgtqtyicnvnhkpsntkvdkkvepkscdkthtcppcpcchprlslhrpaledlllgsean | |
| | ltctltglrdasgatftwtpssgksavqgpperdicgcysvssvlpgcaqpwnhgetftetaah | |
| | pelktpltanitksgntfrpqvyllpppseelalnelvsltclakgfspkdvlvrwlqgsqelp | |
| | renykttasvqepsqgtttfavtsilrvaaedwkkgdtfscmvghealplaftqksisrsp | |
| 100 | evqlvesggglvqpggslrlscaasgfnikdtyihwvrqapgkglewvariyptngytryadsv | 2749 |
| | kgrftisadtskntaylqmnslraedtavyycsrwggdgfyamdywgqgtlvtvssastkgpsv | |
| | fplapsskstsggtaalgclvkdyfpepvtvswnsgaltsgvhtfpavlqssglyslssvvtvp | |
| | ssslgtqtyicnvnhkpsntkvdkkvepkscdkthtcppcpcchprvflfrpaledlllgsean | |
| | vtcvvtglrdedpevkfnwyvdgvevhnaktkpreeqycgcysvvsvlpgcaqpwnhgkeykck | |
| | aahpelpapiektiskakgqprepqvytlppsrdeltknqvsltclvkgfypsdilvrwlqgsq | |
| | elprenykttppvldsdgsfflyskltvdksrwqqgntfscmvghealplaftqktlslsp | |
| 101 | evqlvesggglvqpggslrlscaasgfnikdtyihwvrqapgkglewvariyptngytryadsv | 2750 |
| | kgrftisadtskntaylqmnslraedtavyycsrwggdgfyamdywgqgtlvtvssastkgpsv | |
| | fplapsskstsggtaalgclvkdyfpepvtvswnsgaltsgvhtfpavlqssglyslssvvtvp | |
| | ssslgtqtyicnvnhkpsntkvdkkvepkscdkthtcppcpcchprvflfrpaledlllgsean | |
| | vtcvvtglrdedpevkfnwyvdgvevhnaktkpreeqycgcysvvsvlpgcaqpwnhgkeykck | |
| | aahpelpapiektiskakgqprepqvyllppsrdeltknqvsltclakgfypkdvlvrwlqgsq | |
| | elprenykttasvldsdgsffvyskltvaaedwkkgdtfscmvghealplaftqksisrsp | |
| 102 | evqlvesggglvqpggslrlscaasgfnikdtyihwvrqapgkglewvariyptngytryadsv | 2751 |
| | kgrftisadtskntaylqmnslraedtavyycsrwggdgfyamdywgqgtlvtvssastkgpsv | |
| | fplapsskstsggtaalgclvkdyfpepvtvswnsgaltsgvhtfpavlqssglyslssvvtvp | |
| | ssslgtqtyicnvnhkpsntkvdkkvepkscdkthtcppcpcchprvflfrpaledlllgsean | |
| | vtcvvtglrdedpevkfnwyvdgvevhnaktkpreeqycgcysvvsvlpgcaqpwnhgkeykck | |
| | aahpelpapiektiskakgqprepqvyllppsrdeltknqvsltclakgfypkdvlvrwlqgsq | |
| | elprenykttasvldsdgsffvyskltvdksrwqqgnvfscmvghealplaftqksislsp | |
| 103 | evqlvesggglvqpggslrlscaasgfnikdtyihwvrqapgkglewvariyptngytryadsv | 2752 |
| | kgrftisadtskntaylqmnslraedtavyycsrwggdgfyamdywgqgtlvtvssastkgpsv | |
| | fplapsskstsggtaalgclvkdyfpepvtvswnsgaltsgvhtfpavlqssglyslssvvtvp | |
| | ssslgtqtyicnvnhkpsntkvdkkvepkscdkthtcppcpcchprvflfrpaledlllgsean | |
| | vtcvvtglrdedpevkfnwyvdgvevhnaktkpreeqycgcysvvsvltvlhqdwlngkeykck | |
| | aahpelpapiektiskakgqprepqvytlppsrdeltknqvsltclvkgfypsdilvrwlqgsq | |
| | elprenykttppvldsdgsfflyskltvdksrwqqgntfscmvghealplaftqktlslsp | |
| 104 | Evqlvesggglvqpggslrlscaasgfnikdtyihwvrqapgkglewvariyptngytryadsv | 2753 |
| | kgrftisadtskntaylqmnslraedtavyycsrwggdgfyamdywgqgtlvtvssastkgpsv | |
| | fplapsskstsggtaalgclvkdyfpepvtvswnsgaltsgvhtfpavlqssglyslssvvtvp | |
| | ssslgtqtyicnvnhkpsntkvdkkvepkscdkthtcppcpcchprvflfrpaledlllgsean | |
| | vtcvvtglrdedpevkfnwyvdgvevhnaktkpreeqycgcysvvsvltvlhqdwlngkeykck | |
| | aahpelpapiektiskakgqprepqvyllppsrdeltknqvsltclakgfypkdvlvrwlqgsq | |
| | elprenykttasvldsdgsffvyskltvaaedwkkgdtfscmvghealplaftqksisrsp | |
| 105 | evqlvesggglvqpggslrlscaasgfnikdtyihwvrqapgkglewvariyptngytryadsv | 2754 |
| | kgrftisadtskntaylqmnslraedtavyycsrwggdgfyamdywgqgtlvtvssastkgpsv | |
| | fplapsskstsggtaalgclvkdyfpepvtvswnsgaltsgvhtfpavlqssglyslssvvtvp | |
| | ssslgtqtyicnvnhkpsntkvdkkvepkscdkthtcppcpcchprvflfrpaledlllgsean | |
| | vtcvvtglrdedpevkfnwyvdgvevhnaktkpreeqycgcysvvsvltvlhqdwlngkeykck | |
| | aahpelpapiektiskakgqprepqvyllppsrdeltknqvsltclakgfypkdvlvrwlqgsq | |
| | elprenykttasvldsdgsffvyskltvdksrwqqgnvfscmvghealplaftqksislsp | |
| 106 | evqlvesggglvqpggslrlscaasgfnikdtyihwvrqapgkglewvariyptngytryadsv | 2755 |
| | kgrftisadtskntaylqmnslraedtavyycsrwggdgfyamdywgqgtlvtvssastkgpsv | |
| | fplapsskstsggtaalgclvkdyfpepvtvswnsgaltsgvhtfpavlqssglyslssvvtvp | |
| | ssslgtqtyicnvnhkpsntkvdkkvepkscdkthtcppcpcchprvflfrpaledlllgsean | |
| | vtcvvtglrdedpevkfnwyvdgvevhnaktkpreeqycgcysvvsvlpgcaqpwnhgkeykck | |
| | vsnkalpapiektiskakgqprepqvytlppsrdeltknqvsltclvkgfypsdilvrwlqgsq | |
| | elprenykttppvldsdgsfflyskltvdksrwqqgntfscmvghealplaftqktlslsp | |
| 107 | evqlvesggglvqpggslrlscaasgfnikdtyihwvrqapgkglewvariyptngytryadsv | 2756 |
| | kgrftisadtskntaylqmnslraedtavyycsrwggdgfyamdywgqgtlvtvssastkgpsv | |
| | fplapsskstsggtaalgclvkdyfpepvtvswnsgaltsgvhtfpavlqssglyslssvvtvp | |
| | ssslgtqtyicnvnhkpsntkvdkkvepkscdkthtcppcpcchprvflfrpaledlllgsean | |
| | vtcvvtglrdedpevkfnwyvdgvevhnaktkpreeqycgcysvvsvlpgcaqpwnhgkeykck | |
| | vsnkalpapiektiskakgqprepqvyllppsrdeltknqvsltclakgfypkdvlvrwlqgsq | |
| | elprenykttasvldsdgsffvyskltvaaedwkkgdtfscmvghealplaftqksisrsp | |
| 108 | evqlvesggglvqpggslrlscaasgfnikdtyihwvrqapgkglewvariyptngytryadsv | 2757 |
| | kgrftisadtskntaylqmnslraedtavyycsrwggdgfyamdywgqgtlvtvssastkgpsv | |
| | fplapsskstsggtaalgclvkdyfpepvtvswnsgaltsgvhtfpavlqssglyslssvvtvp | |
| | ssslgtqtyicnvnhkpsntkvdkkvepkscdkthtcppcpcchprvflfrpaledlllgsean | |
| | vtcvvtglrdedpevkfnwyvdgvevhnaktkpreeqycgcysvvsvlpgcaqpwnhgkeykck | |
| | vsnkalpapiektiskakgqprepqvyllppsrdeltknqvsltclakgfypkdvlvrwlqgsq | |
| | elprenykttasvldsdgsffvyskltvdksrwqqgnvfscmvghealplaftqksislsp | |
| 109 | evqlvesggglvqpggslrlscaasgfnikdtyihwvrqapgkglewvariyptngytryadsv | 2758 |
| | kgrftisadtskntaylqmnslraedtavyycsrwggdgfyamdywgqgtlvtvssastkgpsv | |
| | fplapsskstsggtaalgclvkdyfpepvtvswnsgaltsgvhtfpavlqssglyslssvvtvp | |
| | ssslgtqtyicnvnhkpsntkvdkkvepkscdkthtcppcpcchprvflfrpaledlllgsean | |
| | vtcvvtglrdedpevkfnwyvdgvevhnaktkpreeqycgcysvvsvltvlhqdwlngkeykck | |
| | vsnkalpapiektiskakgqprepqvytlppsrdeltknqvsltclvkgfypsdilvrwlqgsq | |
| | elprenykttppvldsdgsfflyskltvdksrwqqgntfscmvghealplaftqktlslsp | |
| 110 | evqlvesggglvqpggslrlscaasgfnikdtyihwvrqapgkglewvariyptngytryadsv | 2759 |
| | kgrftisadtskntaylqmnslraedtavyycsrwggdgfyamdywgqgtlvtvssastkgpsv | |
| | fplapsskstsggtaalgclvkdyfpepvtvswnsgaltsgvhtfpavlqssglyslssvvtvp | |
| | ssslgtqtyicnvnhkpsntkvdkkvepkscdkthtcppcpcchprvflfrpaledlllgsean | |
| | vtcvvtglrdedpevkfnwyvdgvevhnaktkpreeqycgcysvvsvltvlhqdwlngkeykck | |
| | vsnkalpapiektiskakgqprepqvyllppsrdeltknqvsltclakgfypkdvlvrwlqgsq | |
| | elprenykttasvldsdgsffvyskltvaaedwkkgdtfscmvghealplaftqksisrsp | |
| 111 | evqlvesggglvqpggslrlscaasgfnikdtyihwvrqapgkglewvariyptngytryadsv | 2760 |
| | kgrftisadtskntaylqmnslraedtavyycsrwggdgfyamdywgqgtlvtvssastkgpsv | |
| | fplapsskstsggtaalgclvkdyfpepvtvswnsgaltsgvhtfpavlqssglyslssvvtvp | |
| | ssslgtqtyicnvnhkpsntkvdkkvepkscdkthtcppcpcchprvflfrpaledlllgsean | |
| | vtcvvtglrdedpevkfnwyvdgvevhnaktkpreeqycgcysvvsvltvlhqdwlngkeykck | |
| | vsnkalpapiektiskakgqprepqvyllppsrdeltknqvsltclakgfypkdvlvrwlqgsq | |
| | elprenykttasvldsdgsffvyskltvdksrwqqgnvfscmvghealplaftqksislsp | |
| 112 | evqlvesggglvqpggslrlscaasgfnikdtyihwvrqapgkglewvariyptngytryadsv | 2761 |
| | kgrftisadtskntaylqmnslraedtavyycsrwggdgfyamdywgqgtlvtvssastkgpsv | |
| | fplapsskstsggtaalgclvkdyfpepvtvswnsgaltsgvhtfpavlqssglyslssvvtvp | |
| | ssslgtqtyicnvnhkpsntkvdkkvepkscdkthtcppcpcchprvflfrpaledlllgsean | |
| | vtcvvtglrdedpevkfnwyvdgvevhnaktkpreeqycgcysvvsvlpgcaqpwnhgkeykck | |
| | aahpelpapiektiskagqprepqvytlppsrdeltknqvsltclvkgfypsdilvrwlqgsqe | |
| | lprenykttppvldsdgsfflyskltvdksrwqqgntfscmvghealplaftqktlslsp | |
| 113 | evqlvesggglvqpggslrlscaasgfnikdtyihwvrqapgkglewvariyptngytryadsv | 2762 |
| | kgrftisadtskntaylqmnslraedtavyycsrwggdgfyamdywgqgtlvtvssastkgpsv | |
| | fplapsskstsggtaalgclvkdyfpepvtvswnsgaltsgvhtfpavlqssglyslssvvtvp | |
| | ssslgtqtyicnvnhkpsntkvdkkvepkscdkthtcppcpcchprvflfrpaledlllgsean | |
| | vtcvvtglrdedpevkfnwyvdgvevhnaktkpreeqycgcysvvsvlpgcaqpwnhgkeykck | |
| | aahpelpapiektiskagqprepqvyllppsrdeltknqvsltclakgfypkdvlvrwlqgsqe | |
| | lprenykttasvldsdgsffvyskltvaaedwkkgdtfscmvghealplaftqksisrsp | |
| 114 | evqlvesggglvqpggslrlscaasgfnikdtyihwvrqapgkglewvariyptngytryadsv | 2763 |
| | kgrftisadtskntaylqmnslraedtavyycsrwggdgfyamdywgqgtlvtvssastkgpsv | |
| | fplapsskstsggtaalgclvkdyfpepvtvswnsgaltsgvhtfpavlqssglyslssvvtvp | |
| | ssslgtqtyicnvnhkpsntkvdkkvepkscdkthtcppcpcchprvflfrpaledlllgsean | |
| | vtcvvtglrdedpevkfnwyvdgvevhnaktkpreeqycgcysvvsvlpgcaqpwnhgkeykck | |
| | aahpelpapiektiskagqprepqvyllppsrdeltknqvsltclakgfypkdvlvrwlqgsqe | |
| | lprenykttasvldsdgsffvyskltvdksrwqqgnvfscmvghealplaftqksislsp | |
| 115 | evqlvesggglvqpggslrlscaasgfnikdtyihwvrqapgkglewvariyptngytryadsv | 2764 |
| | kgrftisadtskntaylqmnslraedtavyycsrwggdgfyamdywgqgtlvtvssastkgpsv | |
| | fplapsskstsggtaalgclvkdyfpepvtvswnsgaltsgvhtfpavlqssglyslssvvtvp | |
| | ssslgtqtyicnvnhkpsntkvdkkvepkscdkthtcppcpcchprvflfrpaledlllgsean | |
| | vtcvvtglrdedpevkfnwyvdgvevhnaktkpreeqycgcysvvsvltvlhqdwlngkeykck | |
| | aahpelpapiektiskagqprepqvytlppsrdeltknqvsltclvkgfypsdilvrwlqgsqe | |
| | lprenykttppvldsdgsfflyskltvdksrwqqgntfscmvghealplaftqktlslsp | |
| 116 | evqlvesggglvqpggslrlscaasgfnikdtyihwvrqapgkglewvariyptngytryadsv | 2765 |
| | kgrftisadtskntaylqmnslraedtavyycsrwggdgfyamdywgqgtlvtvssastkgpsv | |
| | fplapsskstsggtaalgclvkdyfpepvtvswnsgaltsgvhtfpavlqssglyslssvvtvp | |
| | ssslgtqtyicnvnhkpsntkvdkkvepkscdkthtcppcpcchprvflfrpaledlllgsean | |
| | vtcvvtglrdedpevkfnwyvdgvevhnaktkpreeqycgcysvvsvltvlhqdwlngkeykck | |
| | aahpelpapiektiskagqprepqvyllppsrdeltknqvsltclakgfypkdvlvrwlqgsqe | |
| | lprenykttasvldsdgsffvyskltvaaedwkkgdtfscmvghealplaftqksisrsp | |
| 117 | evqlvesggglvqpggslrlscaasgfnikdtyihwvrqapgkglewvariyptngytryadsv | 2766 |
| | kgrftisadtskntaylqmnslraedtavyycsrwggdgfyamdywgqgtlvtvssastkgpsv | |
| | fplapsskstsggtaalgclvkdyfpepvtvswnsgaltsgvhtfpavlqssglyslssvvtvp | |
| | ssslgtqtyicnvnhkpsntkvdkkvepkscdkthtcppcpcchprvflfrpaledlllgsean | |
| | vtcvvtglrdedpevkfnwyvdgvevhnaktkpreeqycgcysvvsvltvlhqdwlngkeykck | |
| | aahpelpapiektiskagqprepqvyllppsrdeltknqvsltclakgfypkdvlvrwlqgsqe | |
| | lprenykttasvldsdgsffvyskltvdksrwqqgnvfscmvghealplaftqksislsp | |
| 118 | evqlvesggglvqpggslrlscaasgfnikdtyihwvrqapgkglewvariyptngytryadsv | 2767 |
| | kgrftisadtskntaylqmnslraedtavyycsrwggdgfyamdywgqgtlvtvssastkgpsv | |
| | fplapsskstsggtaalgclvkdyfpepvtvswnsgaltsgvhtfpavlqssglyslssvvtvp | |
| | ssslgtqtyicnvnhkpsntkvdkkvepkscdkthtcppcpcchprvflfrpaledlllgsean | |
| | vtcvvtglrdedpevkfnwyvdgvevhnaktkpreeqycgcysvvsvlpgcaqpwnhgkeykck | |
| | vsnkalpapiektiskagqprepqvytlppsrdeltknqvsltclvkgfypsdilvrwlqgsqe | |
| | lprenykttppvldsdgsfflyskltvdksrwqqgntfscmvghealplaftqktlslsp | |
| 119 | evqlvesggglvqpggslrlscaasgfnikdtyihwvrqapgkglewvariyptngytryadsv | 2768 |
| | kgrftisadtskntaylqmnslraedtavyycsrwggdgfyamdywgqgtlvtvssastkgpsv | |
| | fplapsskstsggtaalgclvkdyfpepvtvswnsgaltsgvhtfpavlqssglyslssvvtvp | |
| | ssslgtqtyicnvnhkpsntkvdkkvepkscdkthtcppcpcchprvflfrpaledlllgsean | |
| | vtcvvtglrdedpevkfnwyvdgvevhnaktkpreeqycgcysvvsvlpgcaqpwnhgkeykck | |
| | vsnkalpapiektiskagqprepqvyllppsrdeltknqvsltclakgfypkdvlvrwlqgsqe | |
| | lprenykttasvldsdgsffvyskltvaaedwkkgdtfscmvghealplaftqksisrsp | |
| 120 | evqlvesggglvqpggslrlscaasgfnikdtyihwvrqapgkglewvariyptngytryadsv | 2769 |
| | kgrftisadtskntaylqmnslraedtavyycsrwggdgfyamdywgqgtlvtvssastkgpsv | |
| | fplapsskstsggtaalgclvkdyfpepvtvswnsgaltsgvhtfpavlqssglyslssvvtvp | |
| | ssslgtqtyicnvnhkpsntkvdkkvepkscdkthtcppcpcchprvflfrpaledlllgsean | |
| | vtcvvtglrdedpevkfnwyvdgvevhnaktkpreeqycgcysvvsvlpgcaqpwnhgkeykck | |
| | vsnkalpapiektiskagqprepqvyllppsrdeltknqvsltclakgfypkdvlvrwlqgsqe | |
| | lprenykttasvldsdgsffvyskltvdksrwqqgnvfscmvghealplaftqksislsp | |
| 121 | evqlvesggglvqpggslrlscaasgfnikdtyihwvrqapgkglewvariyptngytryadsv | 2770 |
| | kgrftisadtskntaylqmnslraedtavyycsrwggdgfyamdywgqgtlvtvssastkgpsv | |
| | fplapsskstsggtaalgclvkdyfpepvtvswnsgaltsgvhtfpavlqssglyslssvvtvp | |
| | ssslgtqtyicnvnhkpsntkvdkkvepkscdkthtcppcpcchprvflfrpaledlllgsean | |
| | vtcvvtglrdedpevkfnwyvdgvevhnaktkpreeqycgcysvvsvltvlhqdwlngkeykck | |
| | vsnkalpapiektiskagqprepqvytlppsrdeltknqvsltclvkgfypsdilvrwlqgsqe | |
| | lprenykttppvldsdgsfflyskltvdksrwqqgntfscmvghealplaftqktlslsp | |
| 122 | evqlvesggglvqpggslrlscaasgfnikdtyihwvrqapgkglewvariyptngytryadsv | 2771 |
| | kgrftisadtskntaylqmnslraedtavyycsrwggdgfyamdywgqgtlvtvssastkgpsv | |
| | fplapsskstsggtaalgclvkdyfpepvtvswnsgaltsgvhtfpavlqssglyslssvvtvp | |
| | ssslgtqtyicnvnhkpsntkvdkkvepkscdkthtcppcpcchprvflfrpaledlllgsean | |
| | vtcvvtglrdedpevkfnwyvdgvevhnaktkpreeqycgcysvvsvltvlhqdwlngkeykck | |
| | vsnkalpapiektiskagqprepqvyllppsrdeltknqvsltclakgfypkdvlvrwlqgsqe | |
| | lprenykttasvldsdgsffvyskltvaaedwkkgdtfscmvghealplaftqksisrsp | |
| 123 | evqlvesggglvqpggslrlscaasgfnikdtyihwvrqapgkglewvariyptngytryadsv | 2772 |
| | kgrftisadtskntaylqmnslraedtavyycsrwggdgfyamdywgqgtlvtvssastkgpsv | |
| | fplapsskstsggtaalgclvkdyfpepvtvswnsgaltsgvhtfpavlqssglyslssvvtvp | |
| | ssslgtqtyicnvnhkpsntkvdkkvepkscdkthtcppcpcchprvflfrpaledlllgsean | |
| | vtcvvtglrdedpevkfnwyvdgvevhnaktkpreeqycgcysvvsvltvlhqdwlngkeykck | |
| | vsnkalpapiektiskagqprepqvyllppsrdeltknqvsltclakgfypkdvlvrwlqgsqe | |
| | lprenykttasvldsdgsffvyskltvdksrwqqgnvfscmvghealplaftqksislsp | |
| 124 | diqmtqspsslsasvgdrvtitcrasqdvntavawyqqkpgkapklliysasflysgvpsrfsg | 2156 |
| | srsgtdftltisslqpedfatyycqqhyttpptfgqgtkveikrtvaapsvflfppsdeqlksg | |
| | tasvvcllnnfypreakvqwkvdnalqsgnsqesvteqdskdstyslsstltlskadyekhkvy | |
| | acevthqglsspvtksfnrgec | |
| 125 | hhhhhhepkscdkthtcppcphprlslhrpaledlllgseanltctltglrdasgatftwtpss | 2835 |
| | gksavqgpperdlcgcysvssvlpgcaqpwnhgetftctaahpelktpltanitksgntfrpev | |
| | hllpppseelalnelvtltclargfspkdvlvrwlqgsqelprekyltwasrqepsqgtttfav | |
| | tsilrvaaedwkkgdtfscmvghealplaftqktidrla | |
| 126 | hhhhhhepkscdkthtcppcpcchprvflfrpaledl11gseanvtcvvtglrdedpevkfnwy | 2836 |
| | vdgvevhnaktkpreeqycgcysvvsvlpgcaqpwnhgkeykckvsnkalpapiektiskagqp | |
| | repqvyllppsrdeltknqvsltclakgfypkdvlvrwlqgsqelprenykttasvldsdgsff | |
| | vyskltvaaedwkkgdtfscmvghealplaftqksisrsp | |
| 127 | hhhhhhepkscdkthtcppcpcchprvflfrpaledl11gseanvtcvvtglrdedpevkfnwy | 2837 |
| | vdgvevhnaktkpreeqycgcysvvsvlpgcaqpwnhgkeykckvsnkalpapiektiskagqp | |
| | repqvyllppsrdeltknqvsltclakgfypkdvlvrwlqgsqelprenykttasvldsdgsff | |
| | vyskltvdksrwqqgnvfscmvghealplaftqksislsp | |
| 128 | hhhhhhepkscdkthtcppcpcchprvflfrpaledl11gseanvtcvvtglrdedpevkfnwy | 2838 |
| | vdgvevhnaktkpreeqycgcysvvsvltvlhqdwlngkeykckvsnkalpapiektiskagqp | |
| | repqvyllppsrdeltknqvsltclakgfypkdvlvrwlqgsqelprenykttasvldsdgsff | |
| | vyskltvaaedwkkgdtfscmvghealplaftqksisrsp | |
| 129 | hhhhhhepkscdkthtcppcpcchprvflfrpaledl11gseanvtcvvtglrdedpevkfnwy | 2839 |
| | vdgvevhnaktkpreeqycgcysvvsvltvlhqdwlngkeykckvsnkalpapiektiskagqp | |
| | repqvyllppsrdeltknqvsltclakgfypkdvlvrwlqgsqelprenykttasvldsdgsff | |
| | vyskltvdksrwqqgnvfscmvghealplaftqksislsp | |
| 130 | evqlvesggglvqpggslrlscaasgfnikdtyihwvrqapgkglewvariyptngytryadsv | 2741 |
| | kgrftisadtskntaylqmnslraedtavyycsrwggdgfyamdywgqgtlvtvssasptspkv | |
| | fplsldstpqdgnvvvaclvqgffpqeplsvtwsesgqnvtarnfppsqdasgdlyttssqltl | |
| | patqcpdgksvtchvkhytnpsqdvtvpcpvpppppcchprlslhrpaledlllgseanltctl | |
| | tglrdasgatftwtpssgksavqgpperdlcgcysvssvlpgcaqpwnhgetftctaahpelkt | |
| | pltanitksgntfrpevhllpppseelalnelvtltclargfspkdvlvrwlqgsqelprekyl | |
| | twasrqepsqgtttfavtsilrvaaedwkkgdtfscmvghealplaftqktidrlagkpthvnv | |
| | svvmaevdgtcy | |
| 131 | evqlvesggglvqpggslrlscaasgfnikdtyihwvrqapgkglewvariyptngytryadsv | 2742 |
| | kgrftisadtskntaylqmnslraedtavyycsrwggdgfyamdywgqgtlvtvssasptspkv | |
| | fplsldstpqdgnvvvaclvqgffpqeplsvtwsesgqnvtarnfppsqdasgdlyttssqltl | |
| | patqcpdgksvtchvkhytnpsqdvtvpcrvpppppcchprlslhrpaledlllgseanltctl | |
| | tglrdasgatftwtpssgksavqgpperdlcgcysvssvlpgcaqpwnhgetftctaahpelkt | |
| | pltanitksgntfrpevhllpppseelalnelvtltclargfspkdvlvrwlqgsqelprekyl | |
| | twasrqepsqgtttfavtsilrvaaedwkkgdtfscmvghealplaftqktidrlagkpthvnv | |
| | svvmaevdgtcy | |
| 132 | evqlvesggglvqpggslrlscaasgfnikdtyihwvrqapgkglewvariyptngytryadsv | 2840 |
| | kgrftisadtskntaylqmnslraedtavyycsrwggdgfyamdywgqgtlvtvssastkgpsv | |
| | fplapsskstsggtaalgclvkdyfpepvtvswnsgaltsgvhtfpavlqssglyslssvvtvp | |
| | ssslgtqtyicnvnhkpsntkvdkkvepkscdkthtcppcpcchprvflfrpaledlllgsean | |
| | vtcvvtglrdedpevkfnwyvdgvevhnaktkpreeqycgcysvvsvlpgcaqpwnhgkeykck | |
| | vsnkalpapiektiskagqprepqvylipperdeitknqvslwclakgfypkdvlvrwlqgsqe | |
| | lprenykttasvldsdgsffvyskltvaaedwkkgdtfscmvghealplaftqksisrsp | |
| 133 | evqlvesggglvqpggslrlscaasgfnikdtyihwvrqapgkglewvariyptngytryadsv | 3090 |
| | kgrftisadtskntaylqmnslraedtavyycsrwggdgfyamdywgqgtlvtvssastkgpsv | |
| | fplapsskstsggtaalgclvkdyfpepvtvswnsgaltsgvhtfpavlqssglyslssvvtvp | |
| | ssslgtqtyicnvnhkpsntkvdkkvepkscdkthtcppcpcchprvflfrpaledlllgsean | |
| | vtcvvtglrdedpevkfnwyvdgvevhnaktkpreeqycgcysvvsvlpgcaqpwnhgkeykck | |
| | vsnkalpapiektiskagqprepqvcllppsrdeltknqvslscaakgfypkdvlvrwlqgsqe | |
| | lprenykttasvldsdgsffvvskltvaaedwkkgdtfscmvghealplaftqksisrsp | |
| 134 | evqlvesggglvqpggslrlscaasgfnikdtyihwvrqapgkglewvariyptngytryadsv | 2842 |
| | kgrftisadtskntaylqmnslraedtavyycsrwggdgfyamdywgqgtlvtvssastkgpsv | |
| | fplapsskstsggtaalgclvkdyfpepvtvswnsgaltsgvhtfpavlqssglyslssvvtvp | |
| | ssslgtqtyicnvnhkpsntkvdkkvepkscdkthtcppcpcchprvflfrpaledlllgsean | |
| | vtcvvtglrdedpevkfnwyvdgvevhnaktkpreeqycgcysvvsvlpgcaqpwnhgkeykck | |
| | vsnkalpapiektiskagqprepqvylipperdeitknqvslwclakgfypkdvlvrwlqgsqe | |
| | lprenykttasvldsdgsffvyskltvdksrwqqgnvfscmvghealplaftqksislsp | |
| 135 | evqlvesggglvqpggslrlscaasgfnikdtyihwvrqapgkglewvariyptngytryadsv | 3091 |
| | kgrftisadtskntaylqmnslraedtavyycsrwggdgfyamdywgqgtlvtvssastkgpsv | |
| | fplapsskstsggtaalgclvkdyfpepvtvswnsgaltsgvhtfpavlqssglyslssvvtvp | |
| | ssslgtqtyicnvnhkpsntkvdkkvepkscdkthtcppcpcchprvflfrpaledlllgsean | |
| | vtcvvtglrdedpevkfnwyvdgvevhnaktkpreeqycgcysvvsvlpgcaqpwnhgkeykck | |
| | vsnkalpapiektiskagqprepqvcllppsrdeltknqvslscaakgfypkdvlvrwlqgsqe | |
| | lprenykttasvldsdgsffvvskltvdksrwqqgnvfscmvghealplaftqksislsp | |
| 136 | evqlvesggglvqpggslrlscaasgfnikdtyihwvrqapgkglewvariyptngytryadsv | 2841 |
| | kgrftisadtskntaylqmnslraedtavyycsrwggdgfyamdywgqgtlvtvssastkgpsv | |
| | fplapsskstsggtaalgclvkdyfpepvtvswnsgaltsgvhtfpavlqssglyslssvvtvp | |
| | ssslgtqtyicnvnhkpsntkvdkkvepkscdkthtcppcpcchprvflfrpaledlllgsean | |
| | vtcvvtglrdedpevkfnwyvdgvevhnaktkpreeqycgcysvvsvltvlhqdwlngkeykck | |
| | vsnkalpapiektiskagqprepqvylipperdeitknqvslwclakgfypkdvlvrwlqgsqe | |
| | lprenykttasvldsdgsffvyskltvaaedwkkgdtfscmvghealplaftqksisrsp | |
| 137 | evqlvesggglvqpggslrlscaasgfnikdtyihwvrqapgkglewvariyptngytryadsv | 3092 |
| | kgrftisadtskntaylqmnslraedtavyycsrwggdgfyamdywgqgtlvtvssastkgpsv | |
| | fplapsskstsggtaalgclvkdyfpepvtvswnsgaltsgvhtfpavlqssglyslssvvtvp | |
| | ssslgtqtyicnvnhkpsntkvdkkvepkscdkthtcppcpcchprvflfrpaledlllgsean | |
| | vtcvvtglrdedpevkfnwyvdgvevhnaktkpreeqycgcysvvsvltvlhqdwlngkeykck | |
| | vsnkalpapiektiskagqprepqvcllppsrdeltknqvslscaakgfypkdvlvrwlqgsqe | |
| | lprenykttasvldsdgsffvvskltvaaedwkkgdtfscmvghealplaftqksisrsp | |
| 138 | evqlvesggglvqpggslrlscaasgfnikdtyihwvrqapgkglewvariyptngytryadsv | 2843 |
| | kgrftisadtskntaylqmnslraedtavyycsrwggdgfyamdywgqgtlvtvssastkgpsv | |
| | fplapsskstsggtaalgclvkdyfpepvtvswnsgaltsgvhtfpavlqssglyslssvvtvp | |
| | ssslgtqtyicnvnhkpsntkvdkkvepkscdkthtcppcpcchprvflfrpaledlllgsean | |
| | vtcvvtglrdedpevkfnwyvdgvevhnaktkpreeqycgcysvvsvltvlhqdwlngkeykck | |
| | vsnkalpapiektiskagqprepqvylipperdeitknqvslwclakgfypkdvlvrwlqgsqe | |
| | lprenykttasvldsdgsffvyskltvdksrwqqgnvfscmvghealplaftqksislsp | |
| 139 | evqlvesggglvqpggslrlscaasgfnikdtyihwvrqapgkglewvariyptngytryadsv | 3093 |
| | kgrftisadtskntaylqmnslraedtavyycsrwggdgfyamdywgqgtlvtvssastkgpsv | |
| | fplapsskstsggtaalgclvkdyfpepvtvswnsgaltsgvhtfpavlqssglyslssvvtvp | |
| | ssslgtqtyicnvnhkpsntkvdkkvepkscdkthtcppcpcchprvflfrpaledlllgsean | |
| | vtcvvtglrdedpevkfnwyvdgvevhnaktkpreeqycgcysvvsvltvlhqdwlngkeykck | |
| | vsnkalpapiektiskagqprepqvcllppsrdeltknqvslscaakgfypkdvlvrwlqgsqe | |
| | lprenykttasvldsdgsffvvskltvdksrwqqgnvfscmvghealplaftqksislsp | |
| 140 | evqlvesggglvqpggslrlscaasgfnikdtyihwvrqapgkglewvariyptngytryadsv | 2844 |
| | kgrftisadtskntaylqmnslraedtavyycsrwggdgfyamdywgqgtlvtvssastkgpsv | |
| | fplapsskstsggtaalgclvkdyfpepvtvswnsgaltsgvhtfpavlqssglyslssvvtvp | |
| | ssslgtqtyicnvnhkpsntkvdkkvepkscdkthtcppcpcchprvflfrpaledlllgsean | |
| | vtcvvtglrdedpevkfnwyvdgvevhnaktkpreeqycgcysvvsvlpgcaqpwnhgkeykck | |
| | vsnkalpapiektiskagqprepqvytlppcrdeltknqvslwclvkgfypsdiavewesngqp | |
| | ennykttppvldsdgsfflyskltvdksrwqqgnvfscsvmhealhnhytqksislsp | |
| 141 | evqlvesggglvqpggslrlscaasgfnikdtyihwvrqapgkglewvariyptngytryadsv | 2851 |
| | kgrftisadtskntaylqmnslraedtavyycsrwggdgfyamdywgqgtlvtvssastkgpsv | |
| | fplapsskstsggtaalgclvkdyfpepvtvswnsgaltsgvhtfpavlqssglyslssvvtvp | |
| | ssslgtqtyicnvnhkpsntkvdkkvepkscdkthtcppcpcchprvflfrpaledlllgsean | |
| | vtcvvtglrdedpevkfnwyvdgvevhnaktkpreeqycgcysvvsvlpgcaqpwnhgkeykck | |
| | vsnkalpapiektiskagqprepqvctlppsrdeltknqvslscavkgfypsdiavewesngqp | |
| | ennykttppvldsdgsfflvskltvdksrwqqgnvfscsvmhealhnhytqkslslsp | |
| 142 | evqlvesggglvqpggslrlscaasgfnikdtyihwvrqapgkglewvariyptngytryadsv | 2845 |
| | kgrftisadtskntaylqmnslraedtavyycsrwggdgfyamdywgqgtlvtvssastkgpsv | |
| | fplapsskstsggtaalgclvkdyfpepvtvswnsgaltsgvhtfpavlqssglyslssvvtvp | |
| | ssslgtqtyicnvnhkpsntkvdkkvepkscdkthtcppcpcchprvflfrpaledlllgsean | |
| | vtcvvtglrdedpevkfnwyvdgvevhnaktkpreeqycgcysvvsvltvlhqdwlngkeykck | |
| | vsnkalpapiektiskagqprepqvytlppcrdeltknqvslwclvkgfypsdiavewesngqp | |
| | ennykttppvldsdgsfflyskltvdksrwqqgnvfscsvmhealhnhytqkslslsp | |
| 143 | evqlvesggglvqpggslrlscaasgfnikdtyihwvrqapgkglewvariyptngytryadsv | 2852 |
| | kgrftisadtskntaylqmnslraedtavyycsrwggdgfyamdywgqgtlvtvssastkgpsv | |
| | fplapsskstsggtaalgclvkdyfpepvtvswnsgaltsgvhtfpavlqssglyslssvvtvp | |
| | ssslgtqtyicnvnhkpsntkvdkkvepkscdkthtcppcpcchprvflfrpaledlllgsean | |
| | vtcvvtglrdedpevkfnwyvdgvevhnaktkpreeqycgcysvvsvltvlhqdwlngkeykck | |
| | vsnkalpapiektiskagqprepqvctlppsrdeltknqvslscavkgfypsdiavewesngqp | |
| | ennykttppvldsdgsfflvskltvdksrwqqgnvfscsvmhealhnhytqkslslsp | |
| 144 | evqlvesggglvqpggslrlscaasgfnikdtyihwvrqapgkglewvariyptngytryadsv | 2846 |
| | kgrftisadtskntaylqmnslraedtavyycsrwggdgfyamdywgqgtlvtvssastkgpsv | |
| | fplapsskstsggtaalgclvkdyfpepvtvswnsgaltsgvhtfpavlqssglyslssvvtvp | |
| | ssslgtqtyicnvnhkpsntkvdkkvepkscdkthtcppcpcchprvflfppkpkdtlmisrtp | |
| | evtcvvtglrdedpevkfnwyvdgvevhnaktkpreeqycgcysvvsvltvlhqdwlngkeykc | |
| | kvsnkalpapiektiskagqprepqvytlppcrdeltknqvslwclvkgfypsdiavewesngq | |
| | pennykttppvldsdgsfflyskltvdksrwqqgnvfscsvmhealhnhytqkslslsp | |
| 145 | evqlvesggglvqpggslrlscaasgfnikdtyihwvrqapgkglewvariyptngytryadsv | 2853 |
| | kgrftisadtskntaylqmnslraedtavyycsrwggdgfyamdywgqgtlvtvssastkgpsv | |
| | fplapsskstsggtaalgclvkdyfpepvtvswnsgaltsgvhtfpavlqssglyslssvvtvp | |
| | ssslgtqtyicnvnhkpsntkvdkkvepkscdkthtcppcpcchprvflfppkpkdtlmisrtp | |
| | evtcvvtglrdedpevkfnwyvdgvevhnaktkpreeqycgcysvvsvltvlhqdwlngkeykc | |
| | kvsnkalpapiektiskagqprepqvctlppsrdeltknqvslscavkgfypsdiavewesngq | |
| | pennykttppvldsdgsfflvskltvdksrwqqgnvfscsvmhealhnhytqkslslsp | |
| 146 | evqlvesggglvqpggslrlscaasgfnikdtyihwvrqapgkglewvariyptngytryadsv | 3082 |
| | kgrftisadtskntaylqmnslraedtavyycsrwggdgfyamdywgqgtlvtvssastkgpsv | |
| | fplapsskstsggtaalgclvkdyfpepvtvswnsgaltsgvhtfpavlqssglyslssvvtvp | |
| | ssslgtqtyicnvnhkpsntkvdkkvepkscdkthtcppcpapellggpsvflfrpaledlllg | |
| | seanvtcvvvdvshedpevkfnwyvdgvevhnaktkpreeqynstyrvvsvlpgcaqpwnhgke | |
| | ykckvsnkalpapiektiskagqprepqvyllppsrdeltknqvsltclakgfypkdvlvrwlq | |
| | gsqelprenykttasvldsdgsffvyskltvaaedwkkgdtfscmvghealplaftqksisrsp | |
| 147 | evqlvesggglvqpggslrlscaasgfnikdtyihwvrqapgkglewvariyptngytryadsv | 3083 |
| | kgrftisadtskntaylqmnslraedtavyycsrwggdgfyamdywgqgtlvtvssastkgpsv | |
| | fplapsskstsggtaalgclvkdyfpepvtvswnsgaltsgvhtfpavlqssglyslssvvtvp | |
| | ssslgtqtyicnvnhkpsntkvdkkvepkscdkthtcppcpapellggpsvflfrpaledlllg | |
| | seanvtcvvvdvshedpevkfnwyvdgvevhnaktkpreeqynstyrvvsvlpgcaqpwnhgke | |
| | ykckvsnkalpapiektiskagqprepqvyllppsrdeltknqvsltclakgfypkdvlvrwlq | |
| | gsqelprenykttasvldsdgsffvyskltvdksrwqqgnvfscmvghealplaftqkslslsp | |
| 148 | evqlvesggglvqpggslrlscaasgfnikdtyihwvrqapgkglewvariyptngytryadsv | 3084 |
| | kgrftisadtskntaylqmnslraedtavyycsrwggdgfyamdywgqgtlvtvssastkgpsv | |
| | fplapsskstsggtaalgclvkdyfpepvtvswnsgaltsgvhtfpavlqssglyslssvvtvp | |
| | ssslgtqtyicnvnhkpsntkvdkkvepkscdkthtcppcpapellggpsvflfrpaledlllg | |
| | seanvtcvvvdvshedpevkfnwyvdgvevhnaktkpreeqynstyrvvsvltvlhqdwlngke | |
| | ykckvsnkalpapiektiskagqprepqvyllppsrdeltknqvsltclakgfypkdvlvrwlq | |
| | gsqelprenykttasvldsdgsffvyskltvaaedwkkgdtfscmvghealplaftqksisrsp | |
| 149 | evqlvesggglvqpggslrlscaasgfnikdtyihwvrqapgkglewvariyptngytryadsv | 3085 |
| | kgrftisadtskntaylqmnslraedtavyycsrwggdgfyamdywgqgtlvtvssastkgpsv | |
| | fplapsskstsggtaalgclvkdyfpepvtvswnsgaltsgvhtfpavlqssglyslssvvtvp | |
| | ssslgtqtyicnvnhkpsntkvdkkvepkscdkthtcppcpapellggpsvflfrpaledlllg | |
| | seanvtcvvvdvshedpevkfnwyvdgvevhnaktkpreeqynstyrvvsvltvlhqdwlngke | |
| | ykckvsnkalpapiektiskagqprepqvyllppsrdeltknqvsltclakgfypkdvlvrwlq | |
| | gsqelprenykttasvldsdgsffvyskltvdksrwqqgnvfscmvghealplaftqkslslsp | |
| 150 | evqlvesggglvqpggslrlscaasgfnikdtyihwvrqapgkglewvariyptngytryadsv | 3086 |
| | kgrftisadtskntaylqmnslraedtavyycsrwggdgfyamdywgqgtlvtvssastkgpsv | |
| | fplapsskstsggtaalgclvkdyfpepvtvswnsgaltsgvhtfpavlqssglyslssvvtvp | |
| | ssslgtqtyicnvnhkpsntkvdkkvepkscdkthtcppcpapellggpdvfifrpaledlllg | |
| | seanvtcvvvdvshedpevkfnwyvdgvevhnaktkpreeqynstyrvvsvlpgcaqpwnhgke | |
| | ykckvsnkalpapeektiskagqprepqvyllppsrdeltknqvsltclakgfypkdvlvrwlq | |
| | gsqelprenykttasvldsdgsffvyskltvaaedwkkgdtfscmvghealplaftqksisrsp | |
| 151 | evqlvesggglvqpggslrlscaasgfnikdtyihwvrqapgkglewvariyptngytryadsv | 3087 |
| | kgrftisadtskntaylqmnslraedtavyycsrwggdgfyamdywgqgtlvtvssastkgpsv | |
| | fplapsskstsggtaalgclvkdyfpepvtvswnsgaltsgvhtfpavlqssglyslssvvtvp | |
| | ssslgtqtyicnvnhkpsntkvdkkvepkscdkthtcppcpapellggpdvfifrpaledlllg | |
| | seanvtcvvvdvshedpevkfnwyvdgvevhnaktkpreeqynstyrvvsvlpgcaqpwnhgke | |
| | ykckvsnkalpapeektiskagqprepqvyllppsrdeltknqvsltclakgfypkdvlvrwlq | |
| | gsqelprenykttasvldsdgsffvyskitvdksrwqqgnvfscmvghealplaftqksislsp | |
| 152 | evqlvesggglvqpggslrlscaasgfnikdtyihwvrqapgkglewvariyptngytryadsv | 3088 |
| | kgrftisadtskntaylqmnslraedtavyycsrwggdgfyamdywgqgtlvtvssastkgpsv | |
| | fplapsskstsggtaalgclvkdyfpepvtvswnsgaltsgvhtfpavlqssglyslssvvtvp | |
| | ssslgtqtyicnvnhkpsntkvdkkvepkscdkthtcppcpapellggpdvfifrpaledlllg | |
| | seanvtcvvvdvshedpevkfnwyvdgvevhnaktkpreeqynstyrvvsvltvlhqdwlngke | |
| | ykckvsnkalpapeektiskagqprepqvyllppsrdeltknqvsltclakgfypkdvlvrwlq | |
| | gsqelprenykttasvldsdgsffvyskltvaaedwkkgdtfscmvghealplaftqksisrsp | |
| 153 | evqlvesggglvqpggslrlscaasgfnikdtyihwvrqapgkglewvariyptngytryadsv | 3089 |
| | kgrftisadtskntaylqmnslraedtavyycsrwggdgfyamdywgqgtlvtvssastkgpsv | |
| | fplapsskstsggtaalgclvkdyfpepvtvswnsgaltsgvhtfpavlqssglyslssvvtvp | |
| | ssslgtqtyicnvnhkpsntkvdkkvepkscdkthtcppcpapellggpdvfifrpaledlllg | |
| | seanvtcvvvdvshedpevkfnwyvdgvevhnaktkpreeqynstyrvvsvltvlhqdwlngke | |
| | ykckvsnkalpapeektiskagqprepqvyllppsrdeltknqvsltclakgfypkdvlvrwlq | |
| | gsqelprenykttasvldsdgsffvyskitvdksrwqqgnvfscmvghealplaftqksislsp | |
| 154 | evqlvesggglvqpggslrlscaasgfnikdtyihwvrqapgkglewvariyptngytryadsv | 3094 |
| | kgrftisadtskntaylqmnslraedtavyycsrwggdgfyamdywgqgtlvtvssastkgpsv | |
| | fplapsskstsggtaalgclvkdyfpepvtvswnsgaltsgvhtfpavlqssglyslssvvtvp | |
| | ssslgtqtyicnvnhkpsntkvdkkvepkscdkthtcppcpcchprvflfppkpkdtlmisrtp | |
| | evtcvvtglrdedpevkfnwyvdgvevhnaktkpreeqycgcysvvsvltvlhqdwlngkeykc | |
| | kvsnkalpapiektiskagqprepqvytlppcrdeltknqvslwclvkgfypsdiavewesngq | |
| | pennykttppvldsdgsfflyskltvdksrwqqgnvfscsvlhealhshytqkslslsp | |
| 155 | evqlvesggglvqpggslrlscaasgfnikdtyihwvrqapgkglewvariyptngytryadsv | 3095 |
| | kgrftisadtskntaylqmnslraedtavyycsrwggdgfyamdywgqgtlvtvssastkgpsv | |
| | fplapsskstsggtaalgclvkdyfpepvtvswnsgaltsgvhtfpavlqssglyslssvvtvp | |
| | ssslgtqtyicnvnhkpsntkvdkkvepkscdkthtcppcpapellggpsvflfrpaledlllg | |
| | seanvtcvvvdvshedpevkfnwyvdgvevhnaktkpreeqynstyrvvsvlpgcaqpwnhgke | |
| | ykckvsnkalpapiektiskagqprepqvcllppsrdeltknqvslscaakgfypkdvlvrwlq | |
| | gsqelprenykttasvldsdgsffvvskltvaaedwkkgdtfscmvghealplaftqksisrsp | |
| 156 | evqlvesggglvqpggslrlscaasgfnikdtyihwvrqapgkglewvariyptngytryadsv | 3096 |
| | kgrftisadtskntaylqmnslraedtavyycsrwggdgfyamdywgqgtlvtvssastkgpsv | |
| | fplapsskstsggtaalgclvkdyfpepvtvswnsgaltsgvhtfpavlqssglyslssvvtvp | |
| | ssslgtqtyicnvnhkpsntkvdkkvepkscdkthtcppcpapellggpsvflfrpaledlllg | |
| | seanvtcvvvdvshedpevkfnwyvdgvevhnaktkpreeqynstyrvvsvlpgcaqpwnhgke | |
| | ykckvsnkalpapiektiskagqprepqvcllppsrdeltknqvslscaakgfypkdvlvrwlq | |
| | gsqelprenykttasvldsdgsffvvskltvdksrwqqgnvfscmvghealplaftqksislsp | |
| 157 | evqlvesggglvqpggslrlscaasgfnikdtyihwvrqapgkglewvariyptngytryadsv | 3097 |
| | kgrftisadtskntaylqmnslraedtavyycsrwggdgfyamdywgqgtlvtvssastkgpsv | |
| | fplapsskstsggtaalgclvkdyfpepvtvswnsgaltsgvhtfpavlqssglyslssvvtvp | |
| | ssslgtqtyicnvnhkpsntkvdkkvepkscdkthtcppcpapellggpsvflfrpaledlllg | |
| | seanvtcvvvdvshedpevkfnwyvdgvevhnaktkpreeqynstyrvvsvltvlhqdwlngke | |
| | ykckvsnkalpapiektiskagqprepqvcllppsrdeltknqvslscaakgfypkdvlvrwlq | |
| | gsqelprenykttasvldsdgsffvvskltvaaedwkkgdtfscmvghealplaftqksisrsp | |
| 158 | evqlvesggglvqpggslrlscaasgfnikdtyihwvrqapgkglewvariyptngytryadsv | 3098 |
| | kgrftisadtskntaylqmnslraedtavyycsrwggdgfyamdywgqgtlvtvssastkgpsv | |
| | fplapsskstsggtaalgclvkdyfpepvtvswnsgaltsgvhtfpavlqssglyslssvvtvp | |
| | ssslgtqtyicnvnhkpsntkvdkkvepkscdkthtcppcpapellggpsvflfrpaledlllg | |
| | seanvtcvvvdvshedpevkfnwyvdgvevhnaktkpreeqynstyrvvsvltvlhqdwlngke | |
| | ykckvsnkalpapiektiskagqprepqvcllppsrdeltknqvslscaakgfypkdvlvrwlq | |
| | gsqelprenykttasvldsdgsffvvskltvdksrwqqgnvfscmvghealplaftqksislsp | |
| 159 | evqlvesggglvqpggslrlscaasgfnikdtyihwvrqapgkglewvariyptngytryadsv | 3099 |
| | kgrftisadtskntaylqmnslraedtavyycsrwggdgfyamdywgqgtlvtvssastkgpsv | |
| | fplapsskstsggtaalgclvkdyfpepvtvswnsgaltsgvhtfpavlqssglyslssvvtvp | |
| | ssslgtqtyicnvnhkpsntkvdkkvepkscdkthtcppcpapellggpsvflfppkpkdtlmi | |
| | srtpevtcvvvdvshedpevkfnwyvdgvevhnaktkpreeqynstyrvvsvltvlhqdwlngk | |
| | eykckvsnkalpapiektiskagqprepqvytlppcrdeltknqvslwclvkgfypsdiavewe | |
| | sngqpennykttppvldsdgsfflyskltvdksrwqqgnvfscsvmhealhnhytqkslslsp | |
| 160 | evqlvesggglvqpggslrlscaasgfnikdtyihwvrqapgkglewvariyptngytryadsv | 3100 |
| | kgrftisadtskntaylqmnslraedtavyycsrwggdgfyamdywgqgtlvtvssastkgpsv | |
| | fplapsskstsggtaalgclvkdyfpepvtvswnsgaltsgvhtfpavlqssglyslssvvtvp | |
| | ssslgtqtyicnvnhkpsntkvdkkvepkscdkthtcppcpapellggpsvflfppkpkdtlmi | |
| | srtpevtcvvvdvshedpevkfnwyvdgvevhnaktkpreeqynstyrvvsvltvlhqdwlngk | |
| | eykckvsnkalpapiektiskagqprepqvytlppcrdeltknqvslwclvkgfypsdiavewe | |
| | sngqpennykttppvldsdgsfflyskltvdksrwqqgnvfscsvlhealhshytqkslslsp | |
| 161 | evqlvesggglvqpggslrlscaasgfnikdtyihwvrqapgkglewvariyptngytryadsv | 3101 |
| | kgrftisadtskntaylqmnslraedtavyycsrwggdgfyamdywgqgtlvtvssastkgpsv | |
| | fplapsskstsggtaalgclvkdyfpepvtvswnsgaltsgvhtfpavlqssglyslssvvtvp | |
| | ssslgtqtyicnvnhkpsntkvdkkvepkscdkthtcppcpapellggpdvfifppkpkdtlmi | |
| | srtpevtcvvvdvshedpevkfnwyvdgvevhnaktkpreeqynstyrvvsvltvlhqdwlngk | |
| | eykckvsnkalpapeektiskagqprepqvytlppcrdeltknqvslwclvkgfypsdiavewe | |
| | sngqpennykttppvldsdgsfflyskltvdksrwqqgnvfscsvmhealhnhytqkslslsp | |
| 162 | evqlvesggglvqpggslrlscaasgfnikdtyihwvrqapgkglewvariyptngytryadsv | 3102 |
| | kgrftisadtskntaylqmnslraedtavyycsrwggdgfyamdywgqgtlvtvssastkgpsv | |
| | fplapsskstsggtaalgclvkdyfpepvtvswnsgaltsgvhtfpavlqssglyslssvvtvp | |
| | ssslgtqtyicnvnhkpsntkvdkkvepkscdkthtcppcpapellggpdvfifppkpkdtlmi | |
| | srtpevtcvvvdvshedpevkfnwyvdgvevhnaktkpreeqynstyrvvsvltvlhqdwlngk | |
| | eykckvsnkalpapeektiskagqprepqvytlppcrdeltknqvslwclvkgfypsdiavewe | |
| | sngqpennykttppvldsdgsfflyskltvdksrwqqgnvfscsvlhealhshytqkslslsp | |
| 163 | evqlvesggglvqpggslrlscaasgfnikdtyihwvrqapgkglewvariyptngytryadsv | 3011 |
| | kgrftisadtskntaylqmnslraedtavyycsrwggdgfyamdywgqgtlvtvssastkgpsv | |
| | fplapsskstsggtaalgclvkdyfpepvtvswnsgaltsgvhtfpavlqssglyslssvvtvp | |
| | ssslgtqtyicnvnhkpsntkvdkkvepkscdkthtcppcpcchprvflfppkpkdtlyitrep | |
| | evtcvvtglrdedpevkfnwyvdgvevhnaktkpreeqycgcysvvsvltvlhqdwlngkeykc | |
| | kvsnkalpapiektiskagqprepqvytlppcrdeltknqvslwclvkgfypsdiavewesngq | |
| | pennykttppvldsdgsfflyskltvdksrwqqgnvfscsvmhealhnhytqkslslsp | |
| 164 | evqlvesggglvqpggslrlscaasgfnikdtyihwvrqapgkglewvariyptngytryadsv | 3013 |
| | kgrftisadtskntaylqmnslraedtavyycsrwggdgfyamdywgqgtlvtvssastkgpsv | |
| | fplapsskstsggtaalgclvkdyfpepvtvswnsgaltsgvhtfpavlqssglyslssvvtvp | |
| | ssslgtqtyicnvnhkpsntkvdkkvepkscdkthtcppcpapellcchpdvfifppkpkdtlm | |
| | isrtpevtcvvtglrdedpevkfnwyvdgvevhnaktkpreeqycgcysvvsvltvlhqdwlng | |
| | keykckvsnkalpapeektiskagqprepqvytlppcrdeltknqvslwclvkgfypsdiavew | |
| | esngqpennykttppvldsdgsfflyskltvdksrwqqgnvfscsvmhealhnhytqkslslsp | |
| 165 | evqlvesggglvqpggslrlscaasgfnikdtyihwvrqapgkglewvariyptngytryadsv | 3014 |
| | kgrftisadtskntaylqmnslraedtavyycsrwggdgfyamdywgqgtlvtvssastkgpsv | |
| | fplapsskstsggtaalgclvkdyfpepvtvswnsgaltsgvhtfpavlqssglyslssvvtvp | |
| | ssslgtqtyicnvnhkpsntkvdkkvepkscdkthtcppcpapellcchprvflfppaledlll | |
| | gseanvtcvvtglrdedpevkfnwyvdgvevhnaktkpreeqycgcysvvsvltvlhqdwlngk | |
| | eykckvsnkalpapiektiskagqprepqvyllppsrdeltknqvsltclakgfypkdvlvrwl | |
| | qgsqelprenykttasvldsdgsffvyskltvaaedwkkgdtfscmvghealplaftqksisrs | |
| | p | |
| 166 | evqlvesggglvqpggslrlscaasgfnikdtyihwvrqapgkglewvariyptngytryadsv | 3015 |
| | kgrftisadtskntaylqmnslraedtavyycsrwggdgfyamdywgqgtlvtvssastkgpsv | |
| | fplapsskstsggtaalgclvkdyfpepvtvswnsgaltsgvhtfpavlqssglyslssvvtvp | |
| | ssslgtqtyicnvnhkpsntkvdkkvepkscdkthtcppcpapellcchprvflfppaledlll | |
| | gseanvtcvvtglrdedpevkfnwyvdgvevhnaktkpreeqynstyrvvsvltvlhqdwlngk | |
| | eykckvsnkalpapiektiskagqprepqvyllppsrdeltknqvsltclakgfypkdvlvrwl | |
| | qgsqelprenykttasvldsdgsffvyskltvaaedwkkgdtfscmvghealplaftqksisrs | |
| | p | |
| 167 | evqlvesggglvqpggslrlscaasgfnikdtyihwvrqapgkglewvariyptngytryadsv | 3016 |
| | kgrftisadtskntaylqmnslraedtavyycsrwggdgfyamdywgqgtlvtvssastkgpsv | |
| | fplapsskstsggtaalgclvkdyfpepvtvswnsgaltsgvhtfpavlqssglyslssvvtvp | |
| | ssslgtqtyicnvnhkpsntkvdkkvepkscdkthtcppcpapellcchprvflfppaledlll | |
| | gseanvtcvvvdvshedpevkfnwyvdgvevhnaktkpreeqynstyrvvsvltvlhqdwlngk | |
| | eykckvsnkalpapiektiskagqprepqvyllppsrdeltknqvsltclakgfypkdvlvrwl | |
| | qgsqelprenykttasvldsdgsffvyskltvaaedwkkgdtfscmvghealplaftqksisrs | |
| | p | |
| 168 | evqlvesggglvqpggslrlscaasgfnikdtyihwvrqapgkglewvariyptngytryadsv | 3017 |
| | kgrftisadtskntaylqmnslraedtavyycsrwggdgfyamdywgqgtlvtvssastkgpsv | |
| | fplapsskstsggtaalgclvkdyfpepvtvswnsgaltsgvhtfpavlqssglyslssvvtvp | |
| | ssslgtqtyicnvnhkpsntkvdkkvepkscdkthtcppcpapellggpsvflfppaledlllg | |
| | seanvtcvvvdvshedpevkfnwyvdgvevhnaktkpreeqynstyrvvsvltvlhqdwlngke | |
| | ykckvsnkalpapiektiskagqprepqvyllppsrdeltknqvsltclakgfypkdvlvrwlq | |
| | gsqelprenykttasvldsdgsffvyskltvaaedwkkgdtfscmvghealplaftqksisrsp | |
| 169 | evqlvesggglvqpggslrlscaasgfnikdtyihwvrqapgkglewvariyptngytryadsv | 3018 |
| | kgrftisadtskntaylqmnslraedtavyycsrwggdgfyamdywgqgtlvtvssastkgpsv | |
| | fplapsskstsggtaalgclvkdyfpepvtvswnsgaltsgvhtfpavlqssglyslssvvtvp | |
| | ssslgtqtyicnvnhkpsntkvdkkvepkscdkthtcppcpapellggpsvflfppaledlllg | |
| | seanvtcvvtglrdedpevkfnwyvdgvevhnaktkpreeqynstyrvvsvltvlhqdwlngke | |
| | ykckvsnkalpapiektiskagqprepqvyllppsrdeltknqvsltclakgfypkdvlvrwlq | |
| | gsqelprenykttasvldsdgsffvyskltvaaedwkkgdtfscmvghealplaftqksisrsp | |
| 170 | evqlvesggglvqpggslrlscaasgfnikdtyihwvrqapgkglewvariyptngytryadsv | 3019 |
| | kgrftisadtskntaylqmnslraedtavyycsrwggdgfyamdywgqgtlvtvssastkgpsv | |
| | fplapsskstsggtaalgclvkdyfpepvtvswnsgaltsgvhtfpavlqssglyslssvvtvp | |
| | ssslgtqtyicnvnhkpsntkvdkkvepkscdkthtcppcpapellggpsvflfppaledlllg | |
| | seanvtcvvtglrdedpevkfnwyvdgvevhnaktkpreeqycgcysvvsvltvlhqdwlngke | |
| | ykckvsnkalpapiektiskagqprepqvyllppsrdeltknqvsltclakgfypkdvlvrwlq | |
| | gsqelprenykttasvldsdgsffvyskltvaaedwkkgdtfscmvghealplaftqksisrsp | |
| 171 | evqlvesggglvqpggslrlscaasgfnikdtyihwvrqapgkglewvariyptngytryadsv | 3020 |
| | kgrftisadtskntaylqmnslraedtavyycsrwggdgfyamdywgqgtlvtvssastkgpsv | |
| | fplapsskstsggtaalgclvkdyfpepvtvswnsgaltsgvhtfpavlqssglyslssvvtvp | |
| | ssslgtqtyicnvnhkpsntkvdkkvepkscdkthtcppcpapellggpsvflfppaledlllg | |
| | seanvtcvvvdvshedpevkfnwyvdgvevhnaktkpreeqycgcysvvsvltvlhqdwlngke | |
| | ykckvsnkalpapiektiskagqprepqvyllppsrdeltknqvsltclakgfypkdvlvrwlq | |
| | gsqelprenykttasvldsdgsffvyskltvaaedwkkgdtfscmvghealplaftqksisrsp | |
| 172 | evqlvesggglvqpggslrlscaasgfnikdtyihwvrqapgkglewvariyptngytryadsv | 3021 |
| | kgrftisadtskntaylqmnslraedtavyycsrwggdgfyamdywgqgtlvtvssastkgpsv | |
| | fplapsskstsggtaalgclvkdyfpepvtvswnsgaltsgvhtfpavlqssglyslssvvtvp | |
| | ssslgtqtyicnvnhkpsntkvdkkvepkscdkthtcppcplggpsvflfppaledlllgsean | |
| | vtcvvvdvshedpevkfnwyvdgvevhnaktkpreeqycgcysvvsvltvlhqdwlngkeykck | |
| | vsnkalpapiektiskagqprepqvyllppsrdeltknqvsltclakgfypkdvlvrwlqgsqe | |
| | lprenykttasvldsdgsffvyskltvaaedwkkgdtfscmvghealplaftqksisrsp | |
| 173 | evqlvesggglvqpggslrlscaasgfnikdtyihwvrqapgkglewvariyptngytryadsv | 3022 |
| | kgrftisadtskntaylqmnslraedtavyycsrwggdgfyamdywgqgtlvtvssastkgpsv | |
| | fplapsskstsggtaalgclvkdyfpepvtvswnsgaltsgvhtfpavlqssglyslssvvtvp | |
| | ssslgtqtyicnvnhkpsntkvdkkvepkscdkthtcppcplggpsvflfppaledlllgsean | |
| | vtcvvvdvshedpevkfnwyvdgvevhnaktkpreeqynstyrvvsvltvlhqdwlngkeykck | |
| | vsnkalpapiektiskagqprepqvyllppsrdeltknqvsltclakgfypkdvlvrwlqgsqe | |
| | lprenykttasvldsdgsffvyskltvaaedwkkgdtfscmvghealplaftqksisrsp | |
| 174 | evqlvesggglvqpggslrlscaasgfnikdtyihwvrqapgkglewvariyptngytryadsv | 3023 |
| | kgrftisadtskntaylqmnslraedtavyycsrwggdgfyamdywgqgtlvtvssastkgpsv | |
| | fplapsskstsggtaalgclvkdyfpepvtvswnsgaltsgvhtfpavlqssglyslssvvtvp | |
| | ssslgtqtyicnvnhkpsntkvdkkvepkscdkthtcppcpcchprvflfrpaledlllgsean | |
| | vtcvvtglrdedpevkfnwyvdgvevhnaktkpreeqycgcysvvsvltvlhqdwlngkeykck | |
| | vsnkalpapiektiskagqprrpevyllppsrdeltknqvsltclakgfypkdvlvrwlqgsqe | |
| | lprenykttasvldsdgsffvyskltvaaedwkkgdtfscmvghealplaftqksisrsp | |
| 175 | evqlvesggglvqpggslrlscaasgfnikdtyihwvrqapgkglewvariyptngytryadsv | 3024 |
| | kgrftisadtskntaylqmnslraedtavyycsrwggdgfyamdywgqgtlvtvssastkgpsv | |
| | fplapsskstsggtaalgclvkdyfpepvtvswnsgaltsgvhtfpavlqssglyslssvvtvp | |
| | ssslgtqtyicnvnhkpsntkvdkkvepkscdkthtcppcpcchprvflfppaledlllgsean | |
| | vtcvvtglrdedpevkfnwyvdgvevhnaktkpreeqycgcysvvsvltvlhqdwlngkeykck | |
| | vsnkalpapiektiskagqprrpevyllppsrdeltknqvsltclakgfypkdvlvrwlqgsqe | |
| | lprenykttasvldsdgsffvyskltvaaedwkkgdtfscmvghealplaftqksisrsp | |
| 176 | evqlvesggglvqpggslrlscaasgfnikdtyihwvrqapgkglewvariyptngytryadsv | 3025 |
| | kgrftisadtskntaylqmnslraedtavyycsrwggdgfyamdywgqgtlvtvssastkgpsv | |
| | fplapsskstsggtaalgclvkdyfpepvtvswnsgaltsgvhtfpavlqssglyslssvvtvp | |
| | ssslgtqtyicnvnhkpsntkvdkkvepkscdkthtcppcpcchprvflfrpaledlllgsean | |
| | vtcvvtglrdasgatfnwyvdgvevhnakqgpperdlcgcysvvsvlpgcaqpwnhgkeykcka | |
| | ahpelktpiektiskagqprepqvyllppsrdeltknqvsltclakgfypkdvlvrwlqgsqel | |
| | prenykttasvidsdgsffvyskltvaaedwkkgdtfscmvghealplaftqksisrsp | |
| 177 | evqlvesggglvqpggslrlscaasgfnikdtyihwvrqapgkglewvariyptngytryadsv | 3026 |
| | kgrftisadtskntaylqmnslraedtavyycsrwggdgfyamdywgqgtlvtvssastkgpsv | |
| | fplapsskstsggtaalgclvkdyfpepvtvswnsgaltsgvhtfpavlqssglyslssvvtvp | |
| | ssslgtqtyicnvnhkpsntkvdkkvepkscdkthtcppcpcchprvflfrpaledlllgsean | |
| | vtcvvtglrdasgatfnwyvdgvevhnakqgpperdlcgcysvvsvltvlhqdwlngkeykcka | |
| | ahpelktpiektiskagqprepqvyllppsrdeltknqvsltclakgfypkdvlvrwlqgsqel | |
| | prenykttasvidsdgsffvyskltvaaedwkkgdtfscmvghealplaftqksisrsp | |
| 178 | evqlvesggglvqpggslrlscaasgfnikdtyihwvrqapgkglewvariyptngytryadsv | 3027 |
| | kgrftisadtskntaylqmnslraedtavyycsrwggdgfyamdywgqgtlvtvssastkgpsv | |
| | fplapsskstsggtaalgclvkdyfpepvtvswnsgaltsgvhtfpavlqssglyslssvvtvp | |
| | ssslgtqtyicnvnhkpsntkvdkkvepkscdkthtcppcpapellcchprvflfrpaledlll | |
| | gseanvtcvvtglrdasgatfnwyvdgvevhnakqgpperdlcgcysvvsvlpgcaqpwnhgke | |
| | ykckaahpelktpiektiskagqprepqvyllppsrdeltknqvsltclakgfypkdvlvrwlq | |
| | gsqelprenykttasvldsdgsffvyskltvaaedwkkgdtfscmvghealplaftqksisrsp | |
| 179 | evqlvesggglvqpggslrlscaasgfnikdtyihwvrqapgkglewvariyptngytryadsv | 3028 |
| | kgrftisadtskntaylqmnslraedtavyycsrwggdgfyamdywgqgtlvtvssastkgpsv | |
| | fplapsskstsggtaalgclvkdyfpepvtvswnsgaltsgvhtfpavlqssglyslssvvtvp | |
| | ssslgtqtyicnvnhkpsntkvdkkvepkscdkthtcppcpapellcchprvflfrpaledlll | |
| | gseanvtcvvtglrdasgatfnwyvdgvevhnakqgpperdlcgcysvvsvltvlhqdwlngke | |
| | ykckaahpelktpiektiskagqprepqvyllppsrdeltknqvsltclakgfypkdvlvrwlq | |
| | gsqelprenykttasvldsdgsffvyskltvaaedwkkgdtfscmvghealplaftqksisrsp | |
| 180 | evqlvesggglvqpggslrlscaasgfnikdtyihwvrqapgkglewvariyptngytryadsv | 3029 |
| | kgrftisadtskntaylqmnslraedtavyycsrwggdgfyamdywgqgtlvtvssastkgpsv | |
| | fplapsskstsggtaalgclvkdvfpepvtvswnsgaltsgvhtfpavlqssglvslssvvtvp | |
| | ssslgtqtyicnvnhkpsntkvdkkvepkscdkthtcppcpapellggpsvflfrpaledlllg | |
| | seanvtcvvtglrdasgatfnwyvdgvevhnakqgpperdlcgcysvvsvlpgcaqpwnhgkey | |
| | kckaahpelktpiektiskagqprepqvyllppsrdeltknqvsltclakgfypkdvlvrwlqg | |
| | sqelprenykttasvldsdgsffvyskltvaaedwkkgdtfscmvghealplaftqksisrsp | |
| 181 | evqlvesggglvqpggslrlscaasgfnikdtyihwvrqapgkglewvariyptngytryadsv | 3030 |
| | kgrftisadtskntaylqmnslraedtavyycsrwggdgfyamdywgqgtlvtvssastkgpsv | |
| | fplapsskstsggtaalgclvkdvfpepvtvswnsgaltsgvhtfpavlqssglvslssvvtvp | |
| | ssslgtqtyicnvnhkpsntkvdkkvepkscdkthtcppcpapellggpsvflfrpaledlllg | |
| | seanvtcvvtglrdasgatfnwyvdgvevhnakqgpperdlcgcysvvsvltvlhqdwlngkey | |
| | kckaahpelktpiektiskagqprepqvyllppsrdeltknqvsltclakgfypkdvlvrwlqg | |
| | sqelprenykttasvldsdgsffvyskltvaaedwkkgdtfscmvghealplaftqksisrsp | |
| 182 | Evqlvesggglvqpggslrlscaasgfnikdtyihwvrqapgkglewvariyptngytryadsv | 3240 |
| | kgrftisadtskntaylqmnslraedtavyycsrwggdgfyamdywgqgtlvtvssasptspkv | |
| | fplsldstpqdgnvvvaclvqgffpqeplsvtwsesgqnvtarnfppsqdasgdlyttssqltl | |
| | patqcpdgksvtchvkhytnpsqdvtvpcrvpppppcchprlslhrpaledlllgseanltctl | |
| | tglrdasgatftwtpssgksavqgpperdlcgcysvssvlpgcaepwnhgetftctaahpelkt | |
| | pltanitksgntfrpevhllpppseelalnelvtltclargfspkdvlvrwlqgsqelprekyl | |
| | twasrqepsqgtttfavtsilrvaaedwkkgdtfscmvghealplaftqktidrla | |
| 183 | evqlvesggglvqpggslrlscaasgfnikdtyihwvrqapgkglewvariyptngytryadsv | 3241 |
| | kgrftisadtskntaylqmnslraedtavyycsrwggdgfyamdywgqgtlvtvssasptspkv | |
| | fplsldstpqdgnvvvaclvqgffpqeplsvtwsesgqnvtarnfppsqdasgdlyttssqltl | |
| | patqcpdgksvtchvkhytnpsqdvtvpcrvpppppcchprlslhrpaledlllgseanltctl | |
| | tglrdasgatftwtpssgksavqgpperdlcgcysvssvlpgcaqpwyhgetftctaahpelkt | |
| | pltanitksgntfrpevhllpppseelalnelvtltclargfspkdvlvrwlqgsqelprekyl | |
| | twasrqepsqgtttfavtsilrvaaedwkkgdtfscmvghealplaftqktidrla | |
| 184 | evqlvesggglvqpggslrlscaasgfnikdtyihwvrqapgkglewvariyptngytryadsv | 3242 |
| | kgrftisadtskntaylqmnslraedtavyycsrwggdgfyamdywgqgtlvtvssasptspkv | |
| | fplsldstpqdgnvvvaclvqgffpqeplsvtwsesgqnvtarnfppsqdasgdlyttssqltl | |
| | patqcpdgksvtchvkhytnpsqdvtvpcrvpppppcchprlslhrpaledlllgseanltctl | |
| | tglrdasgatftwtpssgksavqgpperdlcgcysvssvlpgcaqpwnhgetftctaahpelkt | |
| | pltanitksgntfrpevhllpppseelalnelvtltclargfspkdvlvrwlqgdqelprekyl | |
| | twasrqepsqgtttfavtsilrvaaedwkkgdtfscmvghealplaftqktidrla | |
| 185 | evqlvesggglvqpggslrlscaasgfnikdtyihwvrqapgkglewvariyptngytryadsv | 3243 |
| | kgrftisadtskntaylqmnslraedtavyycsrwggdgfyamdywgqgtlvtvssasptspkv | |
| | fplsldstpqdgnvvvaclvqgffpqeplsvtwsesgqnvtarnfppsqdasgdlyttssqltl | |
| | patqcpdgksvtchvkhytnpsqdvtvpcrvpppppcchprlslhrpaledlllgseanltctl | |
| | tglrdasgatftwtpssgksavqgpperdlcgcysvssvlpgcaqpwnhgetftctaahpelkt | |
| | pltanitksgntfrpevhllpppseelalnelvtltclargfspkdvlvrwlqgsqelprekyl | |
| | twasrqepsqgtttfavtsilrvaaedwkkgdtfscyvghealplaftqktidrla | |
| 186 | evqlvesggglvqpggslrlscaasgfnikdtyihwvrqapgkglewvariyptngytryadsv | 3244 |
| | kgrftisadtskntaylqmnslraedtavyycsrwggdgfyamdywgqgtlvtvssasptspkv | |
| | fplsldstpqdgnvvvaclvqgffpqeplsvtwsesgqnvtarnfppsqdasgdlyttssqltl | |
| | patqcpdgksvtchvkhytnpsqdvtvpcrvpppppcchprlslhrpaledlllgseanltctl | |
| | tglrdasgatftwtpssgksavqgpperdlcgcysvssvlpgcaqpwnhgetftctaahpelkt | |
| | pltanitksgntfrpevhllpppseelalnelvtltclargfspkdvlvrwlqgsqelprekyl | |
| | twasrqepsqgtttfavtsilrvaaedwkkgdtfscmvghealplaftyktidrla | |
| 187 | evqlvesggglvqpggslrlscaasgfnikdtyihwvrqapgkglewvariyptngytryadsv | 3245 |
| | kgrftisadtskntaylqmnslraedtavyycsrwggdgfyamdywgqgtlvtvssasptspkv | |
| | fplsldstpqdgnvvvaclvqgffpqeplsvtwsesgqnvtarnfppsqdasgdlyttssqltl | |
| | patqcpdgksvtchvkhytnpsqdvtvpcrvpppppcchprlslhrpaledlllgseanltctl | |
| | tglrdasgatftwtpssgksavqgpperdlcgcysvssvlpgcaepwyhgetftctaahpelkt | |
| | pltanitksgntfrpevhllpppseelalnelvtltclargfspkdvlvrwlqgsqelprekyl | |
| | twasrqepsqgtttfavtsilrvaaedwkkgdtfscmvghealplaftqktidrla | |
| 188 | evqlvesggglvqpggslrlscaasgfnikdtyihwvrqapgkglewvariyptngytryadsv | 3246 |
| | kgrftisadtskntaylqmnslraedtavyycsrwggdgfyamdywgqgtlvtvssastkgpsv | |
| | fplapsskstsggtaalgclvkdyfpepvtvswnsgaltsgvhtfpavlqssglyslssvvtvp | |
| | ssslgtqtyicnvnhkpsntkvdkkvepkscdkthtcppcpcchprvflfrpaledlllgsean | |
| | vtcvvtglrdedpevkfnwyvdgvevhnaktkpreeqycgcysvvsvltvlhedwlngkeykck | |
| | vsnkalpapiektiskagqprepqvyllppsrdeltknqvsltclakgfypkdvlvrwlqgsqe | |
| | lprenykttasvldsdgsffvyskltvaaedwkkgdtfscmvghealplaftqksisrsp | |
| 189 | evqlvesggglvqpggslrlscaasgfnikdtyihwvrqapgkglewvariyptngytryadsv | 3247 |
| | kgrftisadtskntaylqmnslraedtavyycsrwggdgfyamdywgqgtlvtvssastkgpsv | |
| | fplapsskstsggtaalgclvkdyfpepvtvswnsgaltsgvhtfpavlqssglyslssvvtvp | |
| | ssslgtqtyicnvnhkpsntkvdkkvepkscdkthtcppcpcchprvflfrpaledlllgsean | |
| | vtcvvtglrdedpevkfnwyvdgvevhnaktkpreeqycgcysvvsvltvlhqdwyngkeykck | |
| | vsnkalpapiektiskagqprepqvyllppsrdeltknqvsltclakgfypkdvlvrwlqgsqe | |
| | lprenykttasvldsdgsffvyskltvaaedwkkgdtfscmvghealplaftqksisrsp | |
| 190 | evqlvesggglvqpggslrlscaasgfnikdtyihwvrqapgkglewvariyptngytryadsv | 3248 |
| | kgrftisadtskntaylqmnslraedtavyycsrwggdgfyamdywgqgtlvtvssastkgpsv | |
| | fplapsskstsggtaalgclvkdyfpepvtvswnsgaltsgvhtfpavlqssglyslssvvtvp | |
| | ssslgtqtyicnvnhkpsntkvdkkvepkscdkthtcppcpcchprvflfrpaledlllgsean | |
| | vtcvvtglrdedpevkfnwyvdgvevhnaktkpreeqycgcysvvsvltvlhqdwlngkeykck | |
| | vsnkalpapiektiskagqprepqvyllppsrdeltknqvsltclakgfypkdvlvrwlqgdqe | |
| | lprenykttasvldsdgsffvyskltvaaedwkkgdtfscmvghealplaftqksisrsp | |
| 191 | Evqlvesggglvqpggslrlscaasgfnikdtyihwvrqapgkglewvariyptngytryadsv | 3249 |
| | kgrftisadtskntaylqmnslraedtavyycsrwggdgfyamdywgqgtlvtvssastkgpsv | |
| | fplapsskstsggtaalgclvkdyfpepvtvswnsgaltsgvhtfpavlqssglyslssvvtvp | |
| | ssslgtqtyicnvnhkpsntkvdkkvepkscdkthtcppcpcchprvflfrpaledlllgsean | |
| | vtcvvtglrdedpevkfnwyvdgvevhnaktkpreeqycgcysvvsvltvlhqdwlngkeykck | |
| | vsnkalpapiektiskagqprepqvyllppsrdeltknqvsltclakgfypkdvlvrwlqgsqe | |
| | lprenykttasvldsdgsffvyskltvaaedwkkgdtfscyvghealplaftqksisrsp | |
| 192 | evqlvesggglvqpggslrlscaasgfnikdtyihwvrqapgkglewvariyptngytryadsv | 3250 |
| | kgrftisadtskntaylqmnslraedtavyycsrwggdgfyamdywgqgtlvtvssastkgpsv | |
| | fplapsskstsggtaalgclvkdyfpepvtvswnsgaltsgvhtfpavlqssglyslssvvtvp | |
| | ssslgtqtyicnvnhkpsntkvdkkvepkscdkthtcppcpcchprvflfrpaledlllgsean | |
| | vtcvvtglrdedpevkfnwyvdgvevhnaktkpreeqycgcysvvsvltvlhqdwlngkeykck | |
| | vsnkalpapiektiskagqprepqvyllppsrdeltknqvsltclakgfypkdvlvrwlqgsqe | |
| | lprenykttasvldsdgsffvyskltvaaedwkkgdtfscmvghealplaftyksisrsp | |
| 193 | evqlvesggglvqpggslrlscaasgfnikdtyihwvrqapgkglewvariyptngytryadsv | 3251 |
| | kgrftisadtskntaylqmnslraedtavyycsrwggdgfyamdywgqgtlvtvssastkgpsv | |
| | fplapsskstsggtaalgclvkdyfpepvtvswnsgaltsgvhtfpavlqssglyslssvvtvp | |
| | ssslgtqtyicnvnhkpsntkvdkkvepkscdkthtcppcpcchprvflfrpaledlllgsean | |
| | vtcvvtglrdedpevkfnwyvdgvevhnaktkpreeqycgcysvvsvltvlhedwyngkeykck | |
| | vsnkalpapiektiskagqprepqvyllppsrdeltknqvsltclakgfypkdvlvrwlqgsqe | |
| | lprenykttasvldsdgsffvyskltvaaedwkkgdtfscmvghealplaftqksisrsp | |
| 194 | evqlvesggglvqpggslrlscaasgfnikdtyihwvrqapgkglewvariyptngytryadsv | 3252 |
| | kgrftisadtskntaylqmnslraedtavyycsrwggdgfyamdywgqgtlvtvssastkgpsv | |
| | fplapsskstsggtaalgclvkdyfpepvtvswnsgaltsgvhtfpavlqssglyslssvvtvp | |
| | ssslgtqtyicnvnhkpsntkvdkkvepkscdkthtcppcpapellggpsvflfrpaledlllg | |
| | seanvtcvvvdvshedpevkfnwyvdgvevhnaktkpreeqynstyrvvsvltvlhedwlngke | |
| | ykckvsnkalpapiektiskagqprepqvyllppsrdeltknqvsltclakgfypkdvlvrwlq | |
| | gsqelprenykttasvldsdgsffvyskltvaaedwkkgdtfscmvghealplaftqksisrsp | |
| 195 | evqlvesggglvqpggslrlscaasgfnikdtyihwvrqapgkglewvariyptngytryadsv | 3253 |
| | kgrftisadtskntaylqmnslraedtavyycsrwggdgfyamdywgqgtlvtvssastkgpsv | |
| | fplapsskstsggtaalgclvkdyfpepvtvswnsgaltsgvhtfpavlqssglyslssvvtvp | |
| | ssslgtqtyicnvnhkpsntkvdkkvepkscdkthtcppcpapellggpsvflfrpaledlllg | |
| | seanvtcvvvdvshedpevkfnwyvdgvevhnaktkpreeqynstyrvvsvltvlhqdwyngke | |
| | ykckvsnkalpapiektiskagqprepqvyllppsrdeltknqvsltclakgfypkdvlvrwlq | |
| | gsqelprenykttasvldsdgsffvyskltvaaedwkkgdtfscmvghealplaftqksisrsp | |
| 196 | evqlvesggglvqpggslrlscaasgfnikdtyihwvrqapgkglewvariyptngytryadsv | 3254 |
| | kgrftisadtskntaylqmnslraedtavyycsrwggdgfyamdywgqgtlvtvssastkgpsv | |
| | fplapsskstsggtaalgclvkdyfpepvtvswnsgaltsgvhtfpavlqssglyslssvvtvp | |
| | ssslgtqtyicnvnhkpsntkvdkkvepkscdkthtcppcpapellggpsvflfrpaledlllg | |
| | seanvtcvvvdvshedpevkfnwyvdgvevhnaktkpreeqynstyrvvsvltvlhqdwlngke | |
| | ykckvsnkalpapiektiskagqprepqvyllppsrdeltknqvsltclakgfypkdvlvrwlq | |
| | gdqelprenykttasvldsdgsffvyskltvaaedwkkgdtfscmvghealplaftqksisrsp | |
| 197 | evqlvesggglvqpggslrlscaasgfnikdtyihwvrqapgkglewvariyptngytryadsv | 3255 |
| | kgrftisadtskntaylqmnslraedtavyycsrwggdgfyamdywgqgtlvtvssastkgpsv | |
| | fplapsskstsggtaalgclvkdyfpepvtvswnsgaltsgvhtfpavlqssglyslssvvtvp | |
| | ssslgtqtyicnvnhkpsntkvdkkvepkscdkthtcppcpapellggpsvflfrpaledlllg | |
| | seanvtcvvvdvshedpevkfnwyvdgvevhnaktkpreeqynstyrvvsvltvlhqdwlngke | |
| | ykckvsnkalpapiektiskagqprepqvyllppsrdeltknqvsltclakgfypkdvlvrwlq | |
| | gsqelprenykttasvldsdgsffvyskltvaaedwkkgdtfscyvghealplaftqksisrsp | |
| 198 | evqlvesggglvqpggslrlscaasgfnikdtyihwvrqapgkglewvariyptngytryadsv | 3256 |
| | kgrftisadtskntaylqmnslraedtavyycsrwggdgfyamdywgqgtlvtvssastkgpsv | |
| | fplapsskstsggtaalgclvkdyfpepvtvswnsgaltsgvhtfpavlqssglyslssvvtvp | |
| | ssslgtqtyicnvnhkpsntkvdkkvepkscdkthtcppcpapellggpsvflfrpaledlllg | |
| | seanvtcvvvdvshedpevkfnwyvdgvevhnaktkpreeqynstyrvvsvltvlhqdwlngke | |
| | ykckvsnkalpapiektiskagqprepqvyllppsrdeltknqvsltclakgfypkdvlvrwlq | |
| | gsqelprenykttasvldsdgsffvyskltvaaedwkkgdtfscmvghealplaftyksisrsp | |
| 199 | evqlvesggglvqpggslrlscaasgfnikdtyihwvrqapgkglewvariyptngytryadsv | 3257 |
| | kgrftisadtskntaylqmnslraedtavyycsrwggdgfyamdywgqgtlvtvssastkgpsv | |
| | fplapsskstsggtaalgclvkdyfpepvtvswnsgaltsgvhtfpavlqssglyslssvvtvp | |
| | ssslgtqtyicnvnhkpsntkvdkkvepkscdkthtcppcpapellggpsvflfrpaledlllg | |
| | seanvtcvvvdvshedpevkfnwyvdgvevhnaktkpreeqynstyrvvsvltvlhedwyngke | |
| | ykckvsnkalpapiektiskagqprepqvyllppsrdeltknqvsltclakgfypkdvlvrwlq | |
| | gsqelprenykttasvldsdgsffvyskltvaaedwkkgdtfscmvghealplaftqksisrsp | |
| 200 | evqlvesggglvqpggslrlscaasgfnikdtyihwvrqapgkglewvariyptngytryadsv | 3258 |
| | kgrftisadtskntaylqmnslraedtavyycsrwggdgfyamdywgqgtlvtvssasptspkv | |
| | fplsldstpqdgnvvvaclvqgffpqeplsvtwsesgqnvtarnfppsqdasgdlyttssqltl | |
| | patqcpdgksvtchvkhytnpsqdvtvpcrvpppppcchprlslhrpaledlllgseanltctl | |
| | tglrdasgatftwtpssgksavqgpperdlcgcysvssvlpgcaqpwnhgetftctaahpelkt | |
| | pltanitksgntfrpevhllpppseelalnelvtltclargfspkdvlvrwlqgsqelprekyl | |
| | twasrqepsqgtttfavtsilrvaaedwkkgdtfscyvghealplaftyktidrla | |
| 201 | evqlvesggglvqpggslrlscaasgfnikdtyihwvrqapgkglewvariyptngytryadsv | 3259 |
| | kgrftisadtskntaylqmnslraedtavyycsrwggdgfyamdywgqgtlvtvssasptspkv | |
| | fplsldstpqdgnvvvaclvqgffpqeplsvtwsesgqnvtamfppsqdasgdlyttssqltl | |
| | patqcpdgksvtchvkhytnpsqdvtvpcrvpppppcchprlslhrpaledlllgseanltctl | |
| | tglrdasgatftwtpssgksavqgpperdlcgcysvssvlpgcaqpwnhgetftctaahpelkt | |
| | pltanitksgntfrpevhllpppseelalnelvtltclargfspkdvlvrwlqgdqelprekyl | |
| | twasrqepsqgtttfavtsilrvaaedwkkgdtfscyvghealplaftyktidrla | |
| 202 | evqlvesggglvqpggslrlscaasgfnikdtyihwvrqapgkglewvariyptngytryadsv | 3260 |
| | kgrftisadtskntaylqmnslraedtavyycsrwggdgfyamdywgqgtlvtvssasptspkv | |
| | fplsldstpqdgnvvvaclvqgffpqeplsvtwsesgqnvtamfppsqdasgdlyttssqltl | |
| | patqcpdgksvtchvkhytnpsqdvtvpcrvpppppcchprlslhrpaledlllgseanltctl | |
| | tglrdasgatftwtpssgksavqgpperdlcgcysvssvipgcaepwyhgetftctaahpelkt | |
| | pltanitksgntfrpevhllpppseelalnelvtltclargfspkdvlvrwlqgdqelprekyl | |
| | twasrqepsqgtttfavtsilrvaaedwkkgdtfscmvghealplaftqktidrla | |
| 203 | evqlvesggglvqpggslrlscaasgfnikdtyihwvrqapgkglewvariyptngytryadsv | 3261 |
| | kgrftisadtskntaylqmnslraedtavyycsrwggdgfyamdywgqgtlvtvssasptspkv | |
| | fplsldstpqdgnvvvaclvqgffpqeplsvtwsesgqnvtamfppsqdasgdlyttssqltl | |
| | patqcpdgksvtchvkhytnpsqdvtvpcrvpppppcchprlslhrpaledlllgseanltctl | |
| | tglrdasgatftwtpssgksavqgpperdlcgcysvssvipgcaepwyhgetftctaahpelkt | |
| | pltanitksgntfrpevhllpppseelalnelvtltclargfspkdvlvrwlqgsqelprekyl | |
| | twasrqepsqgtttfavtsilrvaaedwkkgdtfscyvghealplaftyktidrla | |
| 204 | evqlvesggglvqpggslrlscaasgfnikdtyihwvrqapgkglewvariyptngytryadsv | 3262 |
| | kgrftisadtskntaylqmnslraedtavyycsrwggdgfyamdywgqgtlvtvssasptspkv | |
| | fplsldstpqdgnvvvaclvqgffpqeplsvtwsesgqnvtamfppsqdasgdlyttssqltl | |
| | patqcpdgksvtchvkhytnpsqdvtvpcrvpppppcchprlslhrpaledlllgseanltctl | |
| | tglrdasgatftwtpssgksavqgpperdlcgcysvssvipgcaepwyhgetftctaahpelkt | |
| | pltanitksgntfrpevhllpppseelalnelvtltclargfspkdvlvrwlqgdqelprekyl | |
| | twasrqepsqgtttfavtsilrvaaedwkkgdtfscyvghealplaftyktidrla | |
| 205 | evqlvesggglvqpggslrlscaasgfnikdtyihwvrqapgkglewvariyptngytryadsv | 3263 |
| | kgrftisadtskntaylqmnslraedtavyycsrwggdgfyamdywgqgtlvtvssastkgpsv | |
| | fplapsskstsggtaalgclvkdyfpepvtvswnsgaltsgvhtfpavlqssglyslssvvtvp | |
| | ssslgtqtyicnvnhkpsntkvdkkvepkscdkthtcppcpcchprvflfrpaledlllgsean | |
| | vtcvvtglrdedpevkfnwyvdgvevhnaktkpreeqycgcysvvsvltvlhqdwlngkeykck | |
| | vsnkalpapiektiskagqprepqvyllppsrdeltknqvsltclakgfypkdvlvrwlqgsqe | |
| | lprenykttasvldsdgsffvyskltvaaedwkkgdtfscyvghealplaftyksisrsp | |
| 206 | evqlvesggglvqpggslrlscaasgfnikdtyihwvrqapgkglewvariyptngytryadsv | 3264 |
| | kgrftisadtskntaylqmnslraedtavyycsrwggdgfyamdywgqgtlvtvssastkgpsv | |
| | fplapsskstsggtaalgclvkdyfpepvtvswnsgaltsgvhtfpavlqssglyslssvvtvp | |
| | ssslgtqtyicnvnhkpsntkvdkkvepkscdkthtcppcpcchprvflfrpaledlllgsean | |
| | vtcvvtglrdedpevkfnwyvdgvevhnaktkpreeqycgcysvvsvltvlhqdwlngkeykck | |
| | vsnkalpapiektiskagqprepqvyllppsrdeltknqvsltclakgfypkdvlvrwlqgdqe | |
| | lprenykttasvldsdgsffvyskltvaaedwkkgdtfscyvghealplaftyksisrsp | |
| 207 | evqlvesggglvqpggslrlscaasgfnikdtyihwvrqapgkglewvariyptngytryadsv | 3265 |
| | kgrftisadtskntaylqmnslraedtavyycsrwggdgfyamdywgqgtlvtvssastkgpsv | |
| | fplapsskstsggtaalgclvkdyfpepvtvswnsgaltsgvhtfpavlqssglyslssvvtvp | |
| | ssslgtqtyicnvnhkpsntkvdkkvepkscdkthtcppcpcchprvflfrpaledlllgsean | |
| | vtcvvtglrdedpevkfnwyvdgvevhnaktkpreeqycgcysvvsvltvlhedwyngkeykck | |
| | vsnkalpapiektiskagqprepqvyllppsrdeltknqvsltclakgfypkdvlvrwlqgdqe | |
| | lprenykttasvldsdgsffvyskltvaaedwkkgdtfscmvghealplaftqksisrsp | |
| 208 | evqlvesggglvqpggslrlscaasgfnikdtyihwvrqapgkglewvariyptngytryadsv | 3266 |
| | kgrftisadtskntaylqmnslraedtavyycsrwggdgfyamdywgqgtlvtvssastkgpsv | |
| | fplapsskstsggtaalgclvkdyfpepvtvswnsgaltsgvhtfpavlqssglyslssvvtvp | |
| | ssslgtqtyicnvnhkpsntkvdkkvepkscdkthtcppcpcchprvflfrpaledlllgsean | |
| | vtcvvtglrdedpevkfnwyvdgvevhnaktkpreeqycgcysvvsvltvlhedwyngkeykck | |
| | vsnkalpapiektiskagqprepqvyllppsrdeltknqvsltclakgfypkdvlvrwlqgsqe | |
| | lprenykttasvldsdgsffvyskltvaaedwkkgdtfscyvghealplaftyksisrsp | |
| 209 | evqlvesggglvqpggslrlscaasgfnikdtyihwvrqapgkglewvariyptngytryadsv | 3267 |
| | kgrftisadtskntaylqmnslraedtavyycsrwggdgfyamdywgqgtlvtvssastkgpsv | |
| | fplapsskstsqqtaalqclvkdyfpepvtvswnsqaltsqvhtfpavlqssqlyslssvvtvp | |
| | ssslgtqtyicnvnhkpsntkvdkkvepkscdkthtcppcpcchprvflfrpaledlllgsean | |
| | vtcvvtglrdedpevkfnwyvdgvevhnaktkpreeqycgcysvvsvltvlhedwyngkeykck | |
| | vsnkalpapiektiskagqprepqvyllppsrdeltknqvsltclakgfypkdvlvrwlqgdqe | |
| | lprenykttasvldsdgsffvyskltvaaedwkkgdtfscyvghealplaftyksisrsp | |
| 210 | evqlvesggglvqpggslrlscaasgfnikdtyihwvrqapgkglewvariyptngytryadsv | 3268 |
| | kgrftisadtskntaylqmnslraedtavyycsrwggdgfyamdywgqgtlvtvssastkgpsv | |
| | fplapsskstsggtaalgclvkdvfpepvtvswnsgaltsgvhtfpavlqssglyslssvvtvp | |
| | ssslgtqtyicnvnhkpsntkvdkkvepkscdkthtcppcpapellggpsvflfrpaledlllg | |
| | seanvtcvvvdvshedpevkfnwyvdgvevhnaktkpreeqynstyrvvsvltvlhqdwlngke | |
| | ykckvsnkalpapiektiskagqprepqvyllppsrdeltknqvsltclakgfypkdvlvrwlq | |
| | gsqelprenykttasvldsdgsffvyskltvaaedwkkgdtfscyvghealplaftyksisrsp | |
| 211 | evqlvesggglvqpggslrlscaasgfnikdtyihwvrqapgkglewvariyptngytryadsv | 3269 |
| | kgrftisadtskntaylqmnslraedtavyycsrwggdgfyamdywgqgtlvtvssastkgpsv | |
| | fplapsskstsggtaalgclvkdyfpepvtvswnsgaltsgvhtfpavlqssglyslssvvtvp | |
| | ssslgtqtyicnvnhkpsntkvdkkvepkscdkthtcppcpapellggpsvflfrpaledlllg | |
| | seanvtcvvvdvshedpevkfnwyvdgvevhnaktkpreeqynstyrvvsvltvlhqdwlngke | |
| | ykckvsnkalpapiektiskagqprepqvyllppsrdeltknqvsltclakgfypkdvlvrwlq | |
| | gdqelprenykttasvldsdgsffvyskltvaaedwkkgdtfscyvghealplaftyksisrsp | |
| 212 | evqlvesggglvqpggslrlscaasgfnikdtyihwvrqapgkglewvariyptngytryadsv | 3270 |
| | kgrftisadtskntaylqmnslraedtavyycsrwggdgfyamdywgqgtlvtvssastkgpsv | |
| | fplapsskstsggtaalgclvkdyfpepvtvswnsgaltsgvhtfpavlqssglyslssvvtvp | |
| | ssslgtqtyicnvnhkpsntkvdkkvepkscdkthtcppcpapellggpsvflfrpaledlllg | |
| | seanvtcvvvdvshedpevkfnwyvdgvevhnaktkpreeqynstyrvvsvltvlhedwyngke | |
| | ykckvsnkalpapiektiskagqprepqvyllppsrdeltknqvsltclakgfypkdvlvrwlq | |
| | gdqelprenykttasvldsdgsffvyskltvaaedwkkgdtfscmvghealplaftqksisrsp | |
| 213 | evqlvesggglvqpggslrlscaasgfnikdtyihwvrqapgkglewvariyptngytryadsv | 3271 |
| | kgrftisadtskntaylqmnslraedtavyycsrwggdgfyamdywgqgtlvtvssastkgpsv | |
| | fplapsskstsggtaalgclvkdyfpepvtvswnsgaltsgvhtfpavlqssglyslssvvtvp | |
| | ssslgtqtyicnvnhkpsntkvdkkvepkscdkthtcppcpapellggpsvflfrpaledlllg | |
| | seanvtcvvvdvshedpevkfnwyvdgvevhnaktkpreeqynstyrvvsvltvlhedwyngke | |
| | ykckvsnkalpapiektiskagqprepqvyllppsrdeltknqvsltclakgfypkdvlvrwlq | |
| | gsqelprenykttasvldsdgsffvyskltvaaedwkkgdtfscyvghealplaftyksisrsp | |
| 214 | evqlvesggglvqpggslrlscaasgfnikdtyihwvrqapgkglewvariyptngytryadsv | 3272 |
| | kgrftisadtskntaylqmnslraedtavyycsrwggdgfyamdywgqgtlvtvssastkgpsv | |
| | fplapsskstsggtaalgclvkdyfpepvtvswnsgaltsgvhtfpavlqssglyslssvvtvp | |
| | ssslgtqtyicnvnhkpsntkvdkkvepkscdkthtcppcpapellggpsvflfrpaledlllg | |
| | seanvtcvvvdvshedpevkfnwyvdgvevhnaktkpreeqynstyrvvsvltvlhedwyngke | |
| | ykckvsnkalpapiektiskagqprepqvyllppsrdeltknqvsltclakgfypkdvlvrwlq | |
| | gdqelprenykttasvldsdgsffvyskltvaaedwkkgdtfscyvghealplaftyksisrsp | |
| 215 | evqlvesggglvqpggslrlscaasgfnikdtyihwvrqapgkglewvariyptngytryadsv | 3273 |
| | kgrftisadtskntaylqmnslraedtavyycsrwggdgfyamdywgqgtlvtvssasptspkv | |
| | fplsldstpqdgnvvvaclvqgffpqeplsvtwsesgqnvtarnfppsqdasgdlyttssqltl | |
| | patqcpdgksvtchvkhytnpsqdvtvpcrvpppppcchprlslhrpsledlllgseanltctl | |
| | tglrdasgatftwtpssgksavqgpperdlcgcysvssvipgcaqpwnhgetftctaahpelkt | |
| | pltanitksgntfrpevhllpppseelalnelvtltclargfspkdvlvrwlqgsqelprekyl | |
| | twasrqepsqgtttfavtsilrvaaedwkkgdtfscmvghealplaftqktidrla | |
| 216 | evqlvesggglvqpggslrlscaasgfnikdtyihwvrqapgkglewvariyptngytryadsv | 3274 |
| | kgrftisadtskntaylqmnslraedtavyycsrwggdgfyamdywgqgtlvtvssasptspkv | |
| | fplsldstpqdgnvvvaclvqgffpqeplsvtwsesgqnvtarnfppsqdasgdlyttssqltl | |
| | patqcpdgksvtchvkhytnpsqdvtvpcrvpppppcchprlslhrpaledlllgseanltctl | |
| | tglrdasgatftwtpssgksavqgpperdlcgcysvssvipgcaqpwnhgetftctaahpelkt | |
| | pltanitksgntfrpevhllpppseelalnelvtltclargfspkdvlvrwlqgsqelprekyl | |
| | twasrqepsqgtttfavtsilrvaaedwkkgdtfscmvghealplaftqktidrla | |
| 217 | evqlvesggglvqpggslrlscaasgfnikdtyihwvrqapgkglewvariyptngytryadsv | 3275 |
| | kgrftisadtskntaylqmnslraedtavyycsrwggdgfyamdywgqgtlvtvssasptspkv | |
| | fplsldstpqdgnvvvaclvqgffpqeplsvtwsesgqnvtarnfppsqdasgdlyttssqltl | |
| | patqcpdgksvtchvkhytnpsqdvtvpcrvpppppcchprlslhrpaledlllgseanltctl | |
| | tglrdasgatftwtpssgksavqgpperdlcgcysvssvlpvcaqpwnhgetftctaahpelkt | |
| | pltanitksgntfrpevhllpppseelalnelvtltclargfspkdvlvrwlqgsqelprekyl | |
| | twasrqepsqgtttfavtsilrvaaedwkkgdtfscmvghealplaftqktidrla | |
| 218 | evqlvesggglvqpggslrlscaasgfnikdtyihwvrqapgkglewvariyptngytryadsv | 3276 |
| | kgrftisadtskntaylqmnslraedtavyycsrwggdgfyamdywgqgtlvtvssasptspkv | |
| | fplsldstpqdgnvvvaclvqgffpqeplsvtwsesgqnvtarnfppsqdasgdlyttssqltl | |
| | patqcpdgksvtchvkhytnpsqdvtvpcrvpppppcchprlslhrpaledlllgseanltctl | |
| | tglrdasgatftwtpssgksavqgpperdlcgcysvssvlpgcaqpwnhwetftctaahpelkt | |
| | pltanitksgntfrpevhllpppseelalnelvtltclargfspkdvlvrwlqgsqelprekyl | |
| | twasrqepsqgtttfavtsilrvaaedwkkgdtfscmvghealplaftqktidrla | |
| 219 | evqlvesggglvqpggslrlscaasgfnikdtyihwvrqapgkglewvariyptngytryadsv | 3277 |
| | kgrftisadtskntaylqmnslraedtavyycsrwggdgfyamdywgqgtlvtvssasptspkv | |
| | fplsldstpqdgnvvvaclvqgffpqeplsvtwsesgqnvtarnfppsqdasgdlyttssqltl | |
| | patqcpdgksvtchvkhytnpsqdvtvpcrvpppppcchprlslhrpaledlllgseanltctl | |
| | tglrdasgatftwtpssgksavqgpperdlcgcysvssvlpgcaqpwnhgetftctaahpelkt | |
| | pltanitksgntfrpevhllpppseelalnelvtltclargfspkdvlvrwlqgsqelprekyl | |
| | twasrqepsqgtttfavtsilrvaaedwkkgdtfscmvghdalplaftqktidrla | |
| 220 | evqlvesggglvqpggslrlscaasgfnikdtyihwvrqapgkglewvariyptngytryadsv | 3278 |
| | kgrftisadtskntaylqmnslraedtavyycsrwggdgfyamdywgqgtlvtvssasptspkv | |
| | fplsldstpqdgnvvvaclvqgffpqeplsvtwsesgqnvtarnfppsqdasgdlyttssqltl | |
| | patqcpdgksvtchvkhytnpsqdvtvpcrvpppppcchprlslhrpaledlllgseanltctl | |
| | tglrdasgatftwtpssgksavqgpperdlcgcysvssvlpgcaqpwnhgetftctaahpelkt | |
| | pltanitksgntfrpevhllpppseelalnelvtltclargfspkdvlvrwlqgsqelprekyl | |
| | twasrqepsqgtttfavtsilrvaaedwkkgdtfscmvghealplaftqktidrfa | |
| 221 | evqlvesggglvqpggslrlscaasgfnikdtyihwvrqapgkglewvariyptngytryadsv | 3279 |
| | kgrftisadtskntaylqmnslraedtavyycsrwggdgfyamdywgqgtlvtvssasptspkv | |
| | fplsldstpqdgnvvvaclvqgffpqeplsvtwsesgqnvtarnfppsqdasgdlyttssqltl | |
| | patqcpdgksvtchvkhytnpsqdvtvpcrvpppppcchprlslhrpaledlllgseanltctl | |
| | tglrdasgatftwtpssgksavqgpperdlcgcysvssvipvcaepwyhwetftctaahpelkt | |
| | pltanitksgntfrpevhllpppseelalnelvtltclargfspkdvlvrwlqgsqelprekyl | |
| | twasrqepsqgtttfavtsilrvaaedwkkgdtfscmvghealplaftqktidrla | |
| 222 | evqlvesggglvqpggslrlscaasgfnikdtyihwvrqapgkglewvariyptngytryadsv | 3280 |
| | kgrftisadtskntaylqmnslraedtavyycsrwggdgfyamdywgqgtlvtvssasptspkv | |
| | fplsldstpqdgnvvvaclvqgffpqeplsvtwsesgqnvtarnfppsqdasgdlyttssqltl | |
| | patqcpdgksvtchvkhytnpsqdvtvpcrvpppppcchprlslhrpaledlllgseanltctl | |
| | tglrdasgatftwtpssgksavqgpperdlcgcysvssvlpgcaqpwhhgetftctaahpelkt | |
| | pltanitksgntfrpevhllpppseelalnelvtltclargfspkdvlvrwlqgsqelprekyl | |
| | twasrqepsqgtttfavtsilrvaaedwkkgdtfscmvghealplaftqktidrla | |
| 223 | evqlvesggglvqpggslrlscaasgfnikdtyihwvrqapgkglewvariyptngytryadsv | 3281 |
| | kgrftisadtskntaylqmnslraedtavyycsrwggdgfyamdywgqgtlvtvssastkgpsv | |
| | fplapsskstsggtaalgclvkdyfpepvtvswnsgaltsgvhtfpavlqssglyslssvvtvp | |
| | ssslgtqtyicnvnhkpsntkvdkkvepkscdkthtcppcpcchprvflfrpaledlllgsean | |
| | vtcvvtglrdedpevkfnwyvdgvevhnaktkpreeqycgcysvvsvitvlhedwynwkeykck | |
| | vsnkalpapiektiskagqprepqvyllppsrdeltknqvsltclakgfypkdvlvrwlqgsqe | |
| | lprenykttasvldsdgsffvyskltvaaedwkkgdtfscmvghealplaftqksisrsp | |
| 224 | Evqlvesggglvqpggslrlscaasgfnikdtyihwvrqapgkglewvariyptngytryadsv | 3282 |
| | kgrftisadtskntaylqmnslraedtavyycsrwggdgfyamdywgqgtlvtvssastkgpsv | |
| | fplapsskstsggtaalgclvkdyfpepvtvswnsgaltsgvhtfpavlqssglyslssvvtvp | |
| | ssslgtqtyicnvnhkpsntkvdkkvepkscdkthtcppcpapellggpsvflfrpaledlllg | |
| | seanvtcvvvdvshedpevkfnwyvdgvevhnaktkpreeqynstyrvvsvitvlhedwynwke | |
| | ykckvsnkalpapiektiskagqprepqvyllppsrdeltknqvsltclakgfypkdvlvrwlq | |
| | gsqelprenykttasvldsdgsffvyskitvaaedwkkgdtfscmvghealplaftqksisrsp | |
| 225 | evqlvesggglvqpggslrlscaasgfnikdtyihwvrqapgkglewvariyptngytryadsv | 3309 |
| | kgrftisadtskntaylqmnslraedtavyycsrwggdgfyamdywgqgtlvtvssasptspkv | |
| | fplsldstpqdgnvvvaclvqgffpqeplsvtwsesgqnvtarnfppsqdasgdlyttssqltl | |
| | patqcpdgksvtchvkhytnpsqdvtvpcrvpppppcchprlslhrpaledlllgseanltctl | |
| | tglrdasgatftwtpssgksavqgpperdlcgcysvssvipgcaepwnhgetftctaahpelkt | |
| | pltanitksgntfrpevhllpppseelalnelvtltclargfspkdvlvrwlqgdqelprekyl | |
| | twasrqepsqgtttfavtsilrvaaedwkkgdtfscmvghealplaftqktidrla | |
| 226 | evqlvesggglvqpggslrlscaasgfnikdtyihwvrqapgkglewvariyptngytryadsv | 3310 |
| | kgrftisadtskntaylqmnslraedtavyycsrwggdgfyamdywgqgtlvtvssasptspkv | |
| | fplsldstpqdgnvvvaclvqgffpqeplsvtwsesgqnvtarnfppsqdasgdlyttssqltl | |
| | patqcpdgksvtchvkhytnpsqdvtvpcrvpppppcchprlslhrpaledlllgseanltctl | |
| | tglrdasgatftwtpssgksavqgpperdlcgcysvssvipgcaepwnhgetftctaahpelkt | |
| | pltanitksgntfrpevhllpppseelalnelvtltclargfspkdvlvrwlqgsqelprekyl | |
| | twasrqepsqgtttfavtsilrvaaedwkkgdtfscyvghealplaftqktidrla | |
| 227 | evqlvesggglvqpggslrlscaasgfnikdtyihwvrqapgkglewvariyptngytryadsv | 3311 |
| | kgrftisadtskntaylqmnslraedtavyycsrwggdgfyamdywgqgtlvtvssasptspkv | |
| | fplsldstpqdgnvvvaclvqgffpqeplsvtwsesgqnvtarnfppsqdasgdlyttssqltl | |
| | patqcpdgksvtchvkhytnpsqdvtvpcrvpppppcchprlslhrpaledlllgseanltctl | |
| | tglrdasgatftwtpssgksavqgpperdlcgcysvssvipgcaqpwyhgetftctaahpelkt | |
| | pltanitksgntfrpevhllpppseelalnelvtltclargfspkdvlvrwlqgdqelprekyl | |
| | twasrqepsqgtttfavtsilrvaaedwkkgdtfscmvghealplaftqktidrla | |
| 228 | evqlvesggglvqpggslrlscaasgfnikdtyihwvrqapgkglewvariyptngytryadsv | 3312 |
| | kgrftisadtskntaylqmnslraedtavyycsrwggdgfyamdywgqgtlvtvssasptspkv | |
| | fplsldstpqdgnvvvaclvqgffpqeplsvtwsesgqnvtarnfppsqdasgdlyttssqltl | |
| | patqcpdgksvtchvkhytnpsqdvtvpcrvpppppcchprlslhrpaledlllgseanltctl | |
| | tglrdasgatftwtpssgksavqgpperdlcgcysvssvlpgcaqpwyhgetftctaahpelkt | |
| | pltanitksgntfrpevhllpppseelalnelvtltclargfspkdvlvrwlqgsqelprekyl | |
| | twasrqepsqgtttfavtsilrvaaedwkkgdtfscyvghealplaftqktidrla | |
| 229 | evqlvesggglvqpggslrlscaasgfnikdtyihwvrqapgkglewvariyptngytryadsv | 3313 |
| | kgrftisadtskntaylqmnslraedtavyycsrwggdgfyamdywgqgtlvtvssasptspkv | |
| | fplsldstpqdgnvvvaclvqgffpqeplsvtwsesgqnvtarnfppsqdasgdlyttssqltl | |
| | patqcpdgksvtchvkhytnpsqdvtvpcrvpppppcchprlslhrpaledlllgseanltctl | |
| | tglrdasgatftwtpssgksavqgpperdlcgcysvssvipgcaqpwnhgetftctaahpelkt | |
| | pltanitksgntfrpevhllpppseelalnelvtltclargfspkdvlvrwlqgdqelprekyl | |
| | twasrqepsqgtttfavtsilrvaaedwkkgdtfscyvghealplaftqktidrla | |
| 230 | evqlvesggglvqpggslrlscaasgfnikdtyihwvrqapgkglewvariyptngytryadsv | 3314 |
| | kgrftisadtskntaylqmnslraedtavyycsrwggdgfyamdywgqgtlvtvssasptspkv | |
| | fplsldstpqdgnvvvaclvqgffpqeplsvtwsesgqnvtarnfppsqdasgdlyttssqltl | |
| | patqcpdgksvtchvkhytnpsqdvtvpcrvpppppcchprlslhrpaledlllgseanltctl | |
| | tglrdasgatftwtpssgksavqgpperdlcgcysvssvipgcaepwyhgetftctaahpelkt | |
| | pltanitksgntfrpevhllpppseelalnelvtltclargfspkdvlvrwlqgsqelprekyl | |
| | twasrqepsqgtttfavtsilrvaaedwkkgdtfscyvghealplaftqktidrla | |
| 231 | evqlvesggglvqpggslrlscaasgfnikdtyihwvrqapgkglewvariyptngytryadsv | 3315 |
| | kgrftisadtskntaylqmnslraedtavyycsrwggdgfyamdywgqgtlvtvssasptspkv | |
| | fplsldstpqdgnvvvaclvqgffpqeplsvtwsesgqnvtarnfppsqdasgdlyttssqltl | |
| | patqcpdgksvtchvkhytnpsqdvtvpcrvpppppcchprlslhrpaledlllgseanltctl | |
| | tglrdasgatftwtpssgksavqgpperdlcgcysvssvipgcaqpwyhgetftctaahpelkt | |
| | pltanitksgntfrpevhllpppseelalnelvtltclargfspkdvlvrwlqgdqelprekyl | |
| | twasrqepsqgtttfavtsilrvaaedwkkgdtfscyvghealplaftqktidrla | |
| 232 | evqlvesggglvqpggslrlscaasgfnikdtyihwvrqapgkglewvariyptngytryadsv | 3316 |
| | kgrftisadtskntaylqmnslraedtavyycsrwggdgfyamdywgqgtlvtvssasptspkv | |
| | fplsldstpqdgnvvvaclvqgffpqeplsvtwsesgqnvtarnfppsqdasgdlyttssqltl | |
| | patqcpdgksvtchvkhytnpsqdvtvpcrvpppppcchprlslhrpaledlllgseanltctl | |
| | tglrdasgatftwtpssgksavqgpperdlcgcysvssvipgcaepwnhgetftctaahpelkt | |
| | pltanitksgntfrpevhllpppseelalnelvtltclargfspkdvlvrwlqgdqelprekyl | |
| | twasrqepsqgtttfavtsilrvaaedwkkgdtfscyvghealplaftqktidrla | |
| 233 | evqlvesggglvqpggslrlscaasgfnikdtyihwvrqapgkglewvariyptngytryadsv | 3317 |
| | kgrftisadtskntaylqmnslraedtavyycsrwggdgfyamdywgqgtlvtvssasptspkv | |
| | fplsldstpqdgnvvvaclvqgffpqeplsvtwsesgqnvtarnfppsqdasgdlyttssqltl | |
| | patqcpdgksvtchvkhytnpsqdvtvpcrvpppppcchprlslhrpaledlllgseanltctl | |
| | tglrdasgatftwtpssgksavqgpperdlcgcysvssvipgcaepwyhgetftctaahpelkt | |
| | pltanitksgntfrpevhllpppseelalnelvtltclargfspkdvlvrwlqgdqelprekyl | |
| | twasrqepsqgtttfavtsilrvaaedwkkgdtfscyvghealplaftqktidrla | |
| 234 | evqlvesggglvqpggslrlscaasgfnikdtyihwvrqapgkglewvariyptngytryadsv | 3318 |
| | kgrftisadtskntaylqmnslraedtavyycsrwggdgfyamdywgqgtlvtvssastkgpsv | |
| | fplapsskstsggtaalgclvkdyfpepvtvswnsgaltsgvhtfpavlqssglyslssvvtvp | |
| | ssslgtqtyicnvnhkpsntkvdkkvepkscdkthtcppcpcchprvflfrpaledlllgsean | |
| | vtcvvtglrdedpevkfnwyvdgvevhnaktkpreeqycgcysvvsvltvlhedwlngkeykck | |
| | vsnkalpapiektiskagqprepqvyllppsrdeltknqvsltclakgfypkdvlvrwlqgdqe | |
| | lprenykttasvldsdgsffvyskltvaaedwkkgdtfscmvghealplaftqksisrsp | |
| 235 | evqlvesggglvqpggslrlscaasgfnikdtyihwvrqapgkglewvariyptngytryadsv | 3319 |
| | kgrftisadtskntaylqmnslraedtavyycsrwggdgfyamdywgqgtlvtvssastkgpsv | |
| | fplapsskstsggtaalgclvkdyfpepvtvswnsgaltsgvhtfpavlqssglyslssvvtvp | |
| | ssslgtqtyicnvnhkpsntkvdkkvepkscdkthtcppcpcchprvflfrpaledlllgsean | |
| | vtcvvtglrdedpevkfnwyvdgvevhnaktkpreeqycgcysvvsvltvlhedwlngkeykck | |
| | vsnkalpapiektiskagqprepqvyllppsrdeltknqvsltclakgfypkdvlvrwlqgsqe | |
| | lprenykttasvldsdgsffvyskltvaaedwkkgdtfscyvghealplaftqksisrsp | |
| 236 | evqlvesggglvqpggslrlscaasgfnikdtyihwvrqapgkglewvariyptngytryadsv | 3320 |
| | kgrftisadtskntaylqmnslraedtavyycsrwggdgfyamdywgqgtlvtvssastkgpsv | |
| | fplapsskstsggtaalgclvkdyfpepvtvswnsgaltsgvhtfpavlqssglyslssvvtvp | |
| | ssslgtqtyicnvnhkpsntkvdkkvepkscdkthtcppcpcchprvflfrpaledlllgsean | |
| | vtcvvtglrdedpevkfnwyvdgvevhnaktkpreeqycgcysvvsvltvlhqdwyngkeykck | |
| | vsnkalpapiektiskagqprepqvyllppsrdeltknqvsltclakgfypkdvlvrwlqgdqe | |
| | lprenykttasvldsdgsffvyskltvaaedwkkgdtfscmvghealplaftqksisrsp | |
| 237 | evqlvesggglvqpggslrlscaasgfnikdtyihwvrqapgkglewvariyptngytryadsv | 3321 |
| | kgrftisadtskntaylqmnslraedtavyycsrwggdgfyamdywgqgtlvtvssastkgpsv | |
| | fplapsskstsggtaalgclvkdyfpepvtvswnsgaltsgvhtfpavlqssglyslssvvtvp | |
| | ssslgtqtyicnvnhkpsntkvdkkvepkscdkthtcppcpcchprvflfrpaledlllgsean | |
| | vtcvvtglrdedpevkfnwyvdgvevhnaktkpreeqycgcysvvsvltvlhqdwyngkeykck | |
| | vsnkalpapiektiskagqprepqvyllppsrdeltknqvsltclakgfypkdvlvrwlqgsqe | |
| | lprenykttasvldsdgsffvyskltvaaedwkkgdtfscyvghealplaftqksisrsp | |
| 238 | evqlvesggglvqpggslrlscaasgfnikdtyihwvrqapgkglewvariyptngytryadsv | 3322 |
| | kgrftisadtskntaylqmnslraedtavyycsrwggdgfyamdywgqgtlvtvssastkgpsv | |
| | fplapsskstsggtaalgclvkdvfpepvtvswnsgaltsgvhtfpavlqssglvslssvvtvp | |
| | ssslgtqtyicnvnhkpsntkvdkkvepkscdkthtcppcpcchprvflfrpaledlllgsean | |
| | vtcvvtglrdedpevkfnwyvdgvevhnaktkpreeqycgcysvvsvltvlhqdwlngkeykck | |
| | vsnkalpapiektiskagqprepqvyllppsrdeltknqvsltclakgfypkdvlvrwlqgdqe | |
| | lprenykttasvldsdgsffvyskltvaaedwkkgdtfscyvghealplaftqksisrsp | |
| 239 | evqlvesggglvqpggslrlscaasgfnikdtyihwvrqapgkglewvariyptngytryadsv | 3323 |
| | kgrftisadtskntaylqmnslraedtavyycsrwggdgfyamdywgqgtlvtvssastkgpsv | |
| | fplapsskstsggtaalgclvkdvfpepvtvswnsgaltsgvhtfpavlqssglvslssvvtvp | |
| | ssslgtqtyicnvnhkpsntkvdkkvepkscdkthtcppcpcchprvflfrpaledlllgsean | |
| | vtcvvtglrdedpevkfnwyvdgvevhnaktkpreeqycgcysvvsvltvlhedwyngkeykck | |
| | vsnkalpapiektiskagqprepqvyllppsrdeltknqvsltclakgfypkdvlvrwlqgsqe | |
| | lprenykttasvldsdgsffvyskltvaaedwkkgdtfscyvghealplaftqksisrsp | |
| 240 | evqlvesggglvqpggslrlscaasgfnikdtyihwvrqapgkglewvariyptngytryadsv | 3324 |
| | kgrftisadtskntaylqmnslraedtavyycsrwggdgfyamdywgqgtlvtvssastkgpsv | |
| | fplapsskstsggtaalgclvkdyfpepvtvswnsgaltsgvhtfpavlqssglyslssvvtvp | |
| | ssslgtqtyicnvnhkpsntkvdkkvepkscdkthtcppcpcchprvflfrpaledlllgsean | |
| | vtcvvtglrdedpevkfnwyvdgvevhnaktkpreeqycgcysvvsvltvlhqdwyngkeykck | |
| | vsnkalpapiektiskagqprepqvyllppsrdeltknqvsltclakgfypkdvlvrwlqgdqe | |
| | lprenykttasvldsdgsffvyskltvaaedwkkgdtfscyvghealplaftqksisrsp | |
| 241 | evqlvesggglvqpggslrlscaasgfnikdtyihwvrqapgkglewvariyptngytryadsv | 3325 |
| | kgrftisadtskntaylqmnslraedtavyycsrwggdgfyamdywgqgtlvtvssastkgpsv | |
| | fplapsskstsggtaalgclvkdyfpepvtvswnsgaltsgvhtfpavlqssglyslssvvtvp | |
| | ssslgtqtyicnvnhkpsntkvdkkvepkscdkthtcppcpcchprvflfrpaledlllgsean | |
| | vtcvvtglrdedpevkfnwyvdgvevhnaktkpreeqycgcysvvsvltvlhedwlngkeykck | |
| | vsnkalpapiektiskagqprepqvyllppsrdeltknqvsltclakgfypkdvlvrwlqgdqe | |
| | lprenykttasvldsdgsffvyskltvaaedwkkgdtfscyvghealplaftqksisrsp | |
| 242 | evqlvesggglvqpggslrlscaasgfnikdtyihwvrqapgkglewvariyptngytryadsv | 3326 |
| | kgrftisadtskntaylqmnslraedtavyycsrwggdgfyamdywgqgtlvtvssastkgpsv | |
| | fplapsskstsggtaalgclvkdyfpepvtvswnsgaltsgvhtfpavlqssglyslssvvtvp | |
| | ssslgtqtyicnvnhkpsntkvdkkvepkscdkthtcppcpcchprvflfrpaledlllgsean | |
| | vtcvvtglrdedpevkfnwyvdgvevhnaktkpreeqycgcysvvsvltvlhedwyngkeykck | |
| | vsnkalpapiektiskagqprepqvyllppsrdeltknqvsltclakgfypkdvlvrwlqgdqe | |
| | lprenykttasvldsdgsffvyskltvaaedwkkgdtfscyvghealplaftqksisrsp | |
| 243 | evqlvesggglvqpggslrlscaasgfnikdtyihwvrqapgkglewvariyptngytryadsv | 3327 |
| | kgrftisadtskntaylqmnslraedtavyycsrwggdgfyamdywgqgtlvtvssastkgpsv | |
| | fplapsskstsggtaalgclvkdyfpepvtvswnsgaltsgvhtfpavlqssglyslssvvtvp | |
| | ssslgtqtyicnvnhkpsntkvdkkvepkscdkthtcppcpapellggpsvflfrpaledlllg | |
| | seanvtcvvvdvshedpevkfnwyvdgvevhnaktkpreeqynstyrvvsvltvlhedwlngke | |
| | ykckvsnkalpapiektiskagqprepqvyllppsrdeltknqvsltclakgfypkdvlvrwlq | |
| | gdqelprenykttasvldsdgsffvyskltvaaedwkkgdtfscmvghealplaftqksisrsp | |
| 244 | evqlvesggglvqpggslrlscaasgfnikdtyihwvrqapgkglewvariyptngytryadsv | 3328 |
| | kgrftisadtskntaylqmnslraedtavyycsrwggdgfyamdywgqgtlvtvssastkgpsv | |
| | fplapsskstsggtaalgclvkdyfpepvtvswnsgaltsgvhtfpavlqssglyslssvvtvp | |
| | ssslgtqtyicnvnhkpsntkvdkkvepkscdkthtcppcpapellggpsvflfrpaledlllg | |
| | seanvtcvvvdvshedpevkfnwyvdgvevhnaktkpreeqynstyrvvsvltvlhedwlngke | |
| | ykckvsnkalpapiektiskagqprepqvyllppsrdeltknqvsltclakgfypkdvlvrwlq | |
| | gsqelprenykttasvidsdgsffvyskltvaaedwkkgdtfscyvghealplaftqksisrsp | |
| 245 | evqlvesggglvqpggslrlscaasgfnikdtyihwvrqapgkglewvariyptngytryadsv | 3329 |
| | kgrftisadtskntaylqmnslraedtavyycsrwggdgfyamdywgqgtlvtvssastkgpsv | |
| | fplapsskstsggtaalgclvkdyfpepvtvswnsgaltsgvhtfpavlqssglyslssvvtvp | |
| | ssslgtqtyicnvnhkpsntkvdkkvepkscdkthtcppcpapellggpsvflfrpaledlllg | |
| | seanvtcvvvdvshedpevkfnwyvdgvevhnaktkpreeqynstyrvvsvltvlhqdwyngke | |
| | ykckvsnkalpapiektiskagqprepqvyllppsrdeltknqvsltclakgfypkdvlvrwlq | |
| | gdqelprenykttasvidsdgsffvyskltvaaedwkkgdtfscmvghealplaftqksisrsp | |
| 246 | evqlvesggglvqpggslrlscaasgfnikdtyihwvrqapgkglewvariyptngytryadsv | 3330 |
| | kgrftisadtskntaylqmnslraedtavyycsrwggdgfyamdywgqgtlvtvssastkgpsv | |
| | fplapsskstsggtaalgclvkdyfpepvtvswnsgaltsgvhtfpavlqssglyslssvvtvp | |
| | ssslgtqtyicnvnhkpsntkvdkkvepkscdkthtcppcpapellggpsvflfrpaledlllg | |
| | seanvtcvvvdvshedpevkfnwyvdgvevhnaktkpreeqynstyrvvsvltvlhqdwyngke | |
| | ykckvsnkalpapiektiskagqprepqvyllppsrdeltknqvsltclakgfypkdvlvrwlq | |
| | gsqelprenykttasvidsdgsffvyskltvaaedwkkgdtfscyvghealplaftqksisrsp | |
| 247 | evqlvesggglvqpggslrlscaasgfnikdtyihwvrqapgkglewvariyptngytryadsv | 3331 |
| | kgrftisadtskntaylqmnslraedtavyycsrwggdgfyamdywgqgtlvtvssastkgpsv | |
| | fplapsskstsggtaalgclvkdyfpepvtvswnsgaltsgvhtfpavlqssglyslssvvtvp | |
| | ssslgtqtyicnvnhkpsntkvdkkvepkscdkthtcppcpapellggpsvflfrpaledlllg | |
| | seanvtcvvvdvshedpevkfnwyvdgvevhnaktkpreeqynstyrvvsvltvlhqdwlngke | |
| | ykckvsnkalpapiektiskagqprepqvyllppsrdeltknqvsltclakgfypkdvlvrwlq | |
| | gdqelprenykttasvldsdgsffvyskltvaaedwkkgdtfscyvghealplaftqksisrsp | |
| 248 | evqlvesggglvqpggslrlscaasgfnikdtyihwvrqapgkglewvariyptngytryadsv | 3332 |
| | kgrftisadtskntaylqmnslraedtavyycsrwggdgfyamdywgqgtlvtvssastkgpsv | |
| | fplapsskstsggtaalgclvkdyfpepvtvswnsgaltsgvhtfpavlqssglyslssvvtvp | |
| | ssslgtqtyicnvnhkpsntkvdkkvepkscdkthtcppcpapellggpsvflfrpaledlllg | |
| | seanvtcvvvdvshedpevkfnwyvdgvevhnaktkpreeqynstyrvvsvltvlhedwyngke | |
| | ykckvsnkalpapiektiskagqprepqvyllppsrdeltknqvsltclakgfypkdvlvrwlq | |
| | gsqelprenykttasvldsdgsffvyskltvaaedwkkgdtfscyvghealplaftqksisrsp | |
| 249 | evqlvesggglvqpggslrlscaasgfnikdtyihwvrqapgkglewvariyptngytryadsv | 3333 |
| | kgrftisadtskntaylqmnslraedtavyycsrwggdgfyamdywgqgtlvtvssastkgpsv | |
| | fplapsskstsggtaalgclvkdyfpepvtvswnsgaltsgvhtfpavlqssglyslssvvtvp | |
| | ssslgtqtyicnvnhkpsntkvdkkvepkscdkthtcppcpapellggpsvflfrpaledlllg | |
| | seanvtcvvvdvshedpevkfnwyvdgvevhnaktkpreeqynstyrvvsvltvlhqdwyngke | |
| | ykckvsnkalpapiektiskagqprepqvyllppsrdeltknqvsltclakgfypkdvlvrwlq | |
| | gdqelprenykttasvldsdgsffvyskltvaaedwkkgdtfscyvghealplaftqksisrsp | |
| 250 | evqlvesggglvqpggslrlscaasgfnikdtyihwvrqapgkglewvariyptngytryadsv | 3334 |
| | kgrftisadtskntaylqmnslraedtavyycsrwggdgfyamdywgqgtlvtvssastkgpsv | |
| | fplapsskstsggtaalgclvkdyfpepvtvswnsgaltsgvhtfpavlqssglyslssvvtvp | |
| | ssslgtqtyicnvnhkpsntkvdkkvepkscdkthtcppcpapellggpsvflfrpaledlllg | |
| | seanvtcvvvdvshedpevkfnwyvdgvevhnaktkpreeqynstyrvvsvltvlhedwlngke | |
| | ykckvsnkalpapiektiskagqprepqvyllppsrdeltknqvsltclakgfypkdvlvrwlq | |
| | gdqelprenykttasvldsdgsffvyskltvaaedwkkgdtfscyvghealplaftqksisrsp | |
| 251 | evqlvesggglvqpggslrlscaasgfnikdtyihwvrqapgkglewvariyptngytryadsv | 3335 |
| | kgrftisadtskntaylqmnslraedtavyycsrwggdgfyamdywgqgtlvtvssastkgpsv | |
| | fplapsskstsggtaalgclvkdyfpepvtvswnsgaltsgvhtfpavlqssglyslssvvtvp | |
| | ssslgtqtyicnvnhkpsntkvdkkvepkscdkthtcppcpapellggpsvflfrpaledlllg | |
| | seanvtcvvvdvshedpevkfnwyvdgvevhnaktkpreeqynstyrvvsvltvlhedwyngke | |
| | ykckvsnkalpapiektiskagqprepqvyllppsrdeltknqvsltclakgfypkdvlvrwlq | |
| | gdqelprenykttasvldsdgsffvyskltvaaedwkkgdtfscyvghealplaftqksisrsp | |
| 252 | Evqlvesggglvqpggslrlscaasgfnikdtyihwvrqapgkglewvariyptngytryadsv | 3367 |
| | kgrftisadtskntaylqmnslraedtavyycsrwggdgfyamdywgqgtlvtvssastkgpsv | |
| | fplapsskstsggtaalgclvkdyfpepvtvswnsgaltsgvhtfpavlqssglyslssvvtvp | |
| | ssslgtqtyicnvnhkpsntkvdkkvepkscdkthtcppcpapellggpsvflfrpaledlllg | |
| | seanvtcvvvdvshedpevkfnwyvdgvevhnaktkpreeqynstyrvvsvltvlhedwyngke | |
| | ykckvsnkalpapiektiskagqprepqvcllppsrdeltknqvslscaakgfypkdvlvrwlq | |
| | gdqelprenykttasvldsdgsffvvskitvaaedwkkgdtfscmvghealplaftqksisrsp | |
| 253 | qegdfpmpfisaksspvipidgsvkiqcqaireayltqlmiiknstyreigrrlkfwnetdpef | 2922 |
| | vidhmdankagryqcqyrighyrfrysdtlelvvtglygkpfisadrglvlmpgenisitessa | |
| | hipfdrfslakegelslpqhqsgehpanfslgpvdlnvsgiyrcygwynrspylwsfpsnalel | |
| | vvtdsihqdyttqnhhhhhhglndifeaqkiewhe | |
| 254 | cchprlslhrpaledlllgseanltctltglrdasgvtftwtpssgksavqgpperdlcgcysv | |
| | ssvlpgcaepwnhgktftctaaypesktpltatlsksgntfrpevhllpppseelalnelvtlt | |
| | clargfspkdvlvrwlqgsqelprekyltwasrqepsqgtttfavtsilrvaaedwkkgdtfsc | |
| | mvghealplaftqktidrla | |
| 255 | hhhhhh | |
| 256 | evqlvesggglvqpggslrlscaasgfnikdtyihwvrqapgkglewvariyptngytryadsv | 3400 |
| | kgrftisadtskntaylqmnslraedtavyycsrwggdgfyamdywgqgtlvtvssastkgpsv | |
| | fplapsskstsggtaalgclvkdyfpepvtvswnsgaltsgvhtfpavlqssglyslssvvtvp | |
| | ssslgtqtyicnvnhkpsntkvdkkvepkscdkthtcppcpapellggpsvflfrpaledlllg | |
| | seaavtcvvvdvshedpevkfnwyvdgvevhnaktkpreeqynstyrvvsvltvlhedwyngke | |
| | ykckvsnkalpapiektiskagqprepqvyllppsrdeltknqvsltclakgfypkdvlvrwlq | |
| | gdqelprenykttasvldsdgsffvyskltvaaedwkkgdtfscmvghealplaftqksisrsp | |
| 257 | evqlvesggglvqpggslrlscaasgfnikdtyihwvrqapgkglewvariyptngytryadsv | 3401 |
| | kgrftisadtskntaylqmnslraedtavyycsrwggdgfyamdywgqgtlvtvssastkgpsv | |
| | fplapsskstsggtaalgclvkdyfpepvtvswnsgaltsgvhtfpavlqssglyslssvvtvp | |
| | ssslgtqtyicnvnhkpsntkvdkkvepkscdkthtcppcpapellggpsvflfrpaledlllg | |
| | seanvtcvvvdvshedpevkfnwyvdgvevhnaktkpreeqyastyrvvsvltvlhedwyngke | |
| | ykckvsnkalpapiektiskagqprepqvyllppsrdeltknqvsltclakgfypkdvlvrwlq | |
| | gdqelprenykttasvldsdgsffvyskltvaaedwkkgdtfscmvghealplaftqksisrsp | |
| 258 | evqlvesggglvqpggslrlscaasgfnikdtyihwvrqapgkglewvariyptngytryadsv | 3402 |
| | kgrftisadtskntaylqmnslraedtavyycsrwggdgfyamdywgqgtlvtvssastkgpsv | |
| | fplapsskstsggtaalgclvkdyfpepvtvswnsgaltsgvhtfpavlqssglyslssvvtvp | |
| | ssslgtqtyicnvnhkpsntkvdkkvepkscdkthtcppcpapellggpsvflfrpaledlllg | |
| | seaavtcvvvdvshedpevkfnwyvdgvevhnaktkpreeqyastyrvvsvltvlhedwyngke | |
| | ykckvsnkalpapiektiskagqprepqvyllppsrdeltknqvsltclakgfypkdvlvrwlq | |
| | gdqelprenykttasvldsdgsffvyskltvaaedwkkgdtfscmvghealplaftqksisrsp | |

The application's sequence listing, which the Patent Office published only in electronic form, follows.

SEQUENCE LISTING (258 sequences)

SEQ ID NO: 1 - protein, 448 aa, Artificial Sequence
  Description of Artificial Sequence: Synthetic polypeptide
EVQLVESGGGLVQPGGSLRLSCAASGFNIKDTYIHWVRQAPGKGLEWVARIYPTNGYTRYADSVKGRFTISADTSKNTAYLQMNSLRAEDTAVYYCSRWGGDGFYAMDYWGQGTLVTVSSASTKGPSVFPLAPSSKSTSGGTAALGCLVKDYFPEPVTVSWNSGALTSGVHTFPAVLQSSGLYSLSSVVTVPSSSLGTQTYICNVNHKPSNTKVDKKVEPKSCDKTHTCPPCPAPELLGGPSVFLFPPKPKDTLMISRTPEVTCVVVDVSHEDPEVKFNWYVDGVEVHNAKTKPREEQYNSTYRVVSVLTVLHQDWLNGKEYKCKVSNKALPAPIEKTISKAKGQPREPQVYTLPPSRDELTKNQVSLTCLVKGFYPSDIAVEWESNGQPENNYKTTPPVLDSDGSFFLYSKLTVDKSRWQQGNVFSCSVMHEALHNHYTQKSLSLSP

SEQ ID NO: 2 - protein, 440 aa, Artificial Sequence
  Description of Artificial Sequence: Synthetic polypeptide
EVQLVESGGGLVQPGGSLRLSCAASGFNIKDTYIHWVRQAPGKGLEWVARIYPTNGYTRYADSVKGRFTISADTSKNTAYLQMNSLRAEDTAVYYCSRWGGDGFYAMDYWGQGTLVTVSSASPTSPKVFPLSLDSTPQDGNVVVACLVQGFFPQEPLSVTWSESGQNVTARNFPPSQDASGDLYTTSSQLTLPATQCPDGKSVTCHVKHYTNPSQDVTVPCPVPPPPPCCHPRLSLHRPALEDLLLGSEANLTCTLTGLRDASGATFTWTPSSGKSAVQGPPERDLCGCYSVSSVLPGCAQPWNHGETFTCTAAHPELKTPLTANITKSGNTFRPEVHLLPPPSEELALNELVTLTCLARGFSPKDVLVRWLQGSQELPREKYLTWASRQEPSQGTTTFAVTSILRVAAEDWKKGDTFSCMVGHEALPLAFTQKTIDRLA

SEQ ID NO: 3 - protein, 440 aa, Artificial Sequence
  Description of Artificial Sequence: Synthetic polypeptide
EVQLVESGGGLVQPGGSLRLSCAASGFNIKDTYIHWVRQAPGKGLEWVARIYPTNGYTRYADSVKGRFTISADTSKNTAYLQMNSLRAEDTAVYYCSRWGGDGFYAMDYWGQGTLVTVSSASPTSPKVFPLSLDSTPQDGNVVVACLVQGFFPQEPLSVTWSESGQNVTARNFPPSQDASGDLYTTSSQLTLPATQCPDGKSVTCHVKHYTNPSQDVTVPCRVPPPPPCCHPRLSLHRPALEDLLLGSEANLTCTLTGLRDASGATFTWTPSSGKSAVQGPPERDLCGCYSVSSVLPGCAQPWNHGETFTCTAAHPELKTPLTANITKSGNTFRPEVHLLPPPSEELALNELVTLTCLARGFSPKDVLVRWLQGSQELPREKYLTWASRQEPSQGTTTFAVTSILRVAAEDWKKGDTFSCMVGHEALPLAFTQKTIDRLA

SEQ ID NO: 4 - protein, 436 aa, Artificial Sequence
  Description of Artificial Sequence: Synthetic polypeptide
EVQLVESGGGLVQPGGSLRLSCAASGFNIKDTYIHWVRQAPGKGLEWVARIYPTNGYTRYADSVKGRFTISADTSKNTAYLQMNSLRAEDTAVYYCSRWGGDGFYAMDYWGQGTLVTVSSASTKGPSVFPLAPSSKSTSGGTAALGCLVKDYFPEPVTVSWNSGALTSGVHTFPAVLQSSGLYSLSSVVTVPSSSLGTQTYICNVNHKPSNTKVDKKVVPPPPPCCHPRLSLHRPALEDLLLGSEANLTCTLTGLRDASGATFTWTPSSGKSAVQGPPERDLCGCYSVSSVLPGCAQPWNHGETFTCTAAHPELKTPLTANITKSGNTFRPEVHLLPPPSEELALNELVTLTCLARGFSPKDVLVRWLQGSQELPREKYLTWASRQEPSQGTTTFAVTSILRVAAEDWKKGDTFSCMVGHEALPLAFTQKTIDRLA

SEQ ID NO: 5 - protein, 437 aa, Artificial Sequence
  Description of Artificial Sequence: Synthetic polypeptide
EVQLVESGGGLVQPGGSLRLSCAASGFNIKDTYIHWVRQAPGKGLEWVARIYPTNGYTRYADSVKGRFTISADTSKNTAYLQMNSLRAEDTAVYYCSRWGGDGFYAMDYWGQGTLVTVSSASTKGPSVFPLAPSSKSTSGGTAALGCLVKDYFPEPVTVSWNSGALTSGVHTFPAVLQSSGLYSLSSVVTVPSSSLGTQTYICNVNHKPSNTKVDKKVVPPPPPCCHPRLSLHRPALEDLLLGSEANLTCTLTGLRDASGATFTWTPSSGKSAVQGPPERDLCGCYSVSSVLPGCAQPWNHGETFTCTAAHPELKTPLTANISKAKGQPREPEVHLLPPPSEELALNELVTLTCLARGFSPKDVLVRWLQGSQELPREKYLTWASRQEPSQGTTTFAVTSILRVAAEDWKKGDTFSCMVGHEALPLAFTQKTIDRLA

SEQ ID NO: 6 - protein, 436 aa, Artificial Sequence
  Description of Artificial Sequence: Synthetic polypeptide
EVQLVESGGGLVQPGGSLRLSCAASGFNIKDTYIHWVRQAPGKGLEWVARIYPTNGYTRYADSVKGRFTISADTSKNTAYLQMNSLRAEDTAVYYCSRWGGDGFYAMDYWGQGTLVTVSSASTKGPSVFPLAPSSKSTSGGTAALGCLVKDYFPEPVTVSWNSGALTSGVHTFPAVLQSSGLYSLSSVVTVPSSSLGTQTYICNVNHKPSNTKVDKKVVPPPPPCCHPRLSLHRPALEDLLLGSEANLTCTLTGLRDASGATFTWTPSSGKSAVQGPPERDLCGCYSVSSVLPGCAQPWNHGETFTCTAAHPELKTPLTANISKAGQPREPEVHLLPPPSEELALNELVTLTCLARGFSPKDVLVRWLQGSQELPREKYLTWASRQEPSQGTTTFAVTSILRVAAEDWKKGDTFSCMVGHEALPLAFTQKTIDRLA

SEQ ID NO: 7 - protein, 443 aa, Artificial Sequence
  Description of Artificial Sequence: Synthetic polypeptide
EVQLVESGGGLVQPGGSLRLSCAASGFNIKDTYIHWVRQAPGKGLEWVARIYPTNGYTRYADSVKGRFTISADTSKNTAYLQMNSLRAEDTAVYYCSRWGGDGFYAMDYWGQGTLVTVSSASTKGPSVFPLAPSSKSTSGGTAALGCLVKDYFPEPVTVSWNSGALTSGVHTFPAVLQSSGLYSLSSVVTVPSSSLGTQTYICNVNHKPSNTKVDKKVEPKSCDKTHTCPPCPHPRLSLHRPALEDLLLGSEANLTCTLTGLRDASGATFTWTPSSGKSAVQGPPERDLCGCYSVSSVLPGCAQPWNHGETFTCTAAHPELKTPLTANITKSGNTFRPEVHLLPPPSEELALNELVTLTCLARGFSPKDVLVRWLQGSQELPREKYLTWASRQEPSQGTTTFAVTSILRVAAEDWKKGDTFSCMVGHEALPLAFTQKTIDRLA

SEQ ID NO: 8 - protein, 444 aa, Artificial Sequence
  Description of Artificial Sequence: Synthetic polypeptide
EVQLVESGGGLVQPGGSLRLSCAASGFNIKDTYIHWVRQAPGKGLEWVARIYPTNGYTRYADSVKGRFTISADTSKNTAYLQMNSLRAEDTAVYYCSRWGGDGFYAMDYWGQGTLVTVSSASTKGPSVFPLAPSSKSTSGGTAALGCLVKDYFPEPVTVSWNSGALTSGVHTFPAVLQSSGLYSLSSVVTVPSSSLGTQTYICNVNHKPSNTKVDKKVEPKSCDKTHTCPPCPHPRLSLHRPALEDLLLGSEANLTCTLTGLRDASGATFTWTPSSGKSAVQGPPERDLCGCYSVSSVLPGCAQPWNHGETFTCTAAHPELKTPLTANISKAKGQPREPEVHLLPPPSEELALNELVTLTCLARGFSPKDVLVRWLQGSQELPREKYLTWASRQEPSQGTTTFAVTSILRVAAEDWKKGDTFSCMVGHEALPLAFTQKTIDRLA

SEQ ID NO: 9 - protein, 443 aa, Artificial Sequence
  Description of Artificial Sequence: Synthetic polypeptide
EVQLVESGGGLVQPGGSLRLSCAASGFNIKDTYIHWVRQAPGKGLEWVARIYPTNGYTRYADSVKGRFTISADTSKNTAYLQMNSLRAEDTAVYYCSRWGGDGFYAMDYWGQGTLVTVSSASTKGPSVFPLAPSSKSTSGGTAALGCLVKDYFPEPVTVSWNSGALTSGVHTFPAVLQSSGLYSLSSVVTVPSSSLGTQTYICNVNHKPSNTKVDKKVEPKSCDKTHTCPPCPHPRLSLHRPALEDLLLGSEANLTCTLTGLRDASGATFTWTPSSGKSAVQGPPERDLCGCYSVSSVLPGCAQPWNHGETFTCTAAHPELKTPLTANISKAGQPREPEVHLLPPPSEELALNELVTLTCLARGFSPKDVLVRWLQGSQELPREKYLTWASRQEPSQGTTTFAVTSILRVAAEDWKKGDTFSCMVGHEALPLAFTQKTIDRLA

SEQ ID NO: 10 - protein, 452 aa, Artificial Sequence
  Description of Artificial Sequence: Synthetic polypeptide
EVQLVESGGGLVQPGGSLRLSCAASGFNIKDTYIHWVRQAPGKGLEWVARIYPTNGYTRYADSVKGRFTISADTSKNTAYLQMNSLRAEDTAVYYCSRWGGDGFYAMDYWGQGTLVTVSSASTKGPSVFPLAPSSKSTSGGTAALGCLVKDYFPEPVTVSWNSGALTSGVHTFPAVLQSSGLYSLSSVVTVPSSSLGTQTYICNVNHKPSNTKVDKKVEPKSCDKTHTCPPCPAPELLGGPSVFLFRPALEDLLLGSEPEVTCVVVDVSHEDPEVKFNWYVDGVEVHNAKTKPREEQYNSTYRVVSVLPGCAQPWNHGKEYKCKVSNKALPAPIEKTITKSGNTFRPEVHLLPPPSEELALNELVTLTCLARGFSPKDVLVRWLQGSQELPREKYLTWASRQEPSQGTTTFAVTSILRVAAEDWKKGDTFSCMVGHEALPLAFTQKTIDRLA

SEQ ID NO: 11 - protein, 452 aa, Artificial Sequence
  Description of Artificial Sequence: Synthetic polypeptide
EVQLVESGGGLVQPGGSLRLSCAASGFNIKDTYIHWVRQAPGKGLEWVARIYPTNGYTRYADSVKGRFTISADTSKNTAYLQMNSLRAEDTAVYYCSRWGGDGFYAMDYWGQGTLVTVSSASTKGPSVFPLAPSSKSTSGGTAALGCLVKDYFPEPVTVSWNSGALTSGVHTFPAVLQSSGLYSLSSVVTVPSSSLGTQTYICNVNHKPSNTKVDKKVEPKSCDKTHTCPPCPAPELLGGPSVFLFRPALEDLLLGSEANVTCVVVDVSHEDPEVKFNWYVDGVEVHNAKTKPREEQYNSTYRVVSVLPGCAQPWNHGKEYKCKVSNKALPAPIEKTITKSGNTFRPEVHLLPPPSEELALNELVTLTCLARGFSPKDVLVRWLQGSQELPREKYLTWASRQEPSQGTTTFAVTSILRVAAEDWKKGDTFSCMVGHEALPLAFTQKTIDRLA

SEQ ID NO: 12 - protein, 452 aa, Artificial Sequence
  Description of Artificial Sequence: Synthetic polypeptide
EVQLVESGGGLVQPGGSLRLSCAASGFNIKDTYIHWVRQAPGKGLEWVARIYPTNGYTRYADSVKGRFTISADTSKNTAYLQMNSLRAEDTAVYYCSRWGGDGFYAMDYWGQGTLVTVSSASTKGPSVFPLAPSSKSTSGGTAALGCLVKDYFPEPVTVSWNSGALTSGVHTFPAVLQSSGLYSLSSVVTVPSSSLGTQTYICNVNHKPSNTKVDKKVEPKSCDKTHTCPPCPAPELLGGPSVFLFRPALEDLLLGSEANVTCVVVDVSHEDPEVKFNWYVDGVEVHNAKTKPREEQYNSTYRVVSVLPGLAQPWNHGKEYKCKVSNKALPAPIEKTITKSGNTFRPEVHLLPPPSEELALNELVTLTCLARGFSPKDVLVRWLQGSQELPREKYLTWASRQEPSQGTTTFAVTSILRVAAEDWKKGDTFSCMVGHEALPLAFTQKTIDRLA

SEQ ID NO: 13 - protein, 437 aa, Artificial Sequence
  Description of Artificial Sequence: Synthetic polypeptide
EVQLVESGGGLVQPGGSLRLSCAASGFNIKDTYIHWVRQAPGKGLEWVARIYPTNGYTRYADSVKGRFTISADTSKNTAYLQMNSLRAEDTAVYYCSRWGGDGFYAMDYWGQGTLVTVSSASTKGPSVFPLAPSSKSTSGGTAALGCLVKDYFPEPVTVSWNSGALTSGVHTFPAVLQSSGLYSLSSVVTVPSSSLGTQTYICNVNHKPSNTKVDKKVEPKSCDKTHTCPPCPHPRLSLHRPALEDLLLGSEANLTCTLTGLRDASGATFTWTPSSGKSAVQGPPERDLCGCYSVSSVLPGCAQPWNHGETFTCTAAHPELKTPLTANITKSGNTFRPQVYTLPPSRDELTKNQVSLTCLVKGFYPSDILVRWLQGSQELNNYKTTPPVLDSDGSFFLYSKLTVDKSRWQQGNTFSCMVGHEALPLAFTQKTLSLSP

SEQ ID NO: 14 - protein, 452 aa, Artificial Sequence
  Description of Artificial Sequence: Synthetic polypeptide
EVQLVESGGGLVQPGGSLRLSCAASGFNIKDTYIHWVRQAPGKGLEWVARIYPTNGYTRYADSVKGRFTISADTSKNTAYLQMNSLRAEDTAVYYCSRWGGDGFYAMDYWGQGTLVTVSSASTKGPSVFPLAPSSKSTSGGTAALGCLVKDYFPEPVTVSWNSGALTSGVHTFPAVLQSSGLYSLSSVVTVPSSSLGTQTYICNVNHKPSNTKVDKKVEPKSCDKTHTCPPCPAPELLGGPSVFLFRPALEDLLLGSEANVTCVVVDVSHEDPEVKFNWYVDGVEVHNAKTKPREEQYASTYRVVSVLPGLAQPWNHGKEYKCKVSNKALPAPIEKTISKAGQPREPEVHLLPPPSEELALNELVTLTCLARGFSPKDVLVRWLQGSQELPREKYLTWASRQEPSQGTTTFAVTSILRVAAEDWKKGDTFSCMVGHEALPLAFTQKTIDRLA

SEQ ID NO: 15 - protein, 449 aa, Artificial Sequence
  Description of Artificial Sequence: Synthetic polypeptide
EVQLVESGGGLVQPGGSLRLSCAASGFNIKDTYIHWVRQAPGKGLEWVARIYPTNGYTRYADSVKGRFTISADTSKNTAYLQMNSLRAEDTAVYYCSRWGGDGFYAMDYWGQGTLVTVSSASTKGPSVFPLAPSSKSTSGGTAALGCLVKDYFPEPVTVSWNSGALTSGVHTFPAVLQSSGLYSLSSVVTVPSSSLGTQTYICNVNHKPSNTKVDKKVEPKSCDKTHTCPPCPAPELLGGPSVFLFRPALEDLLLGSEANVTCVVVDVSHEPEVKFNWYVDGVEVAKTKPREEQYNGTYRVVSVLPGLAQPWNHGKEYKCKVSNKALPAPIEKTISKAGQPREPEVHLLPPPSEELALNELVTLTCLARGFSPKDVLVRWLQGSQELPREKYLTWASRQEPSQGTTTFAVTSILRVAAEDWKKGDTFSCMVGHEALPLAFTQKTIDRLA

SEQ ID NO: 16 - protein, 442 aa, Artificial Sequence
  Description of Artificial Sequence: Synthetic polypeptide
EVQLVESGGGLVQPGGSLRLSCAASGFNIKDTYIHWVRQAPGKGLEWVARIYPTNGYTRYADSVKGRFTISADTSKNTAYLQMNSLRAEDTAVYYCSRWGGDGFYAMDYWGQGTLVTVSSASTKGPSVFPLAPSSKSTSGGTAALGCLVKDYFPEPVTVSWNSGALTSGVHTFPAVLQSSGLYSLSSVVTVPSSSLGTQTYICNVNHKPSNTKVDKKVEPKSCDKTHTCPPCGPSVFLFRPALEDLLLGSEANVTCVVVDVSHEPEVKFNWYVDGVEVAKTKPREEQYNGTYRVVSVLPGLAQPWNHGKEYKCKVSNKALPAPIEKTISKAGQPREPEVHLLPPPSEELALNELVTLTCLARGFSPKDVLVRWLQGSQELPREKYLTWASRQEPSQGTTTFAVTSILRVAAEDWKKGDTFSCMVGHEALPLAFTQKTIDRLA

SEQ ID NO: 17 - protein, 449 aa, Artificial Sequence
  Description of Artificial Sequence: Synthetic polypeptide
EVQLVESGGGLVQPGGSLRLSCAASGFNIKDTYIHWVRQAPGKGLEWVARIYPTNGYTRYADSVKGRFTISADTSKNTAYLQMNSLRAEDTAVYYCSRWGGDGFYAMDYWGQGTLVTVSSASTKGPSVFPLAPSSKSTSGGTAALGCLVKDYFPEPVTVSWNSGALTSGVHTFPAVLQSSGLYSLSSVVTVPSSSLGTQTYICNVNHKPSNTKVDKKVEPKSCDKTHTCPPCPAPELCCGPSVFLFRPALEDLLLGSEANVTCVVVDVSHEPEVKFNWYVDGVEVAKTKPREEQYCGCYRVVSVLPGLAQPWNHGKEYKCKVSNKALPAPIEKTISKAGQPREPEVHLLPPPSEELALNELVTLTCLARGFSPKDVLVRWLQGSQELPREKYLTWASRQEPSQGTTTFAVTSILRVAAEDWKKGDTFSCMVGHEALPLAFTQKTIDRLA

SEQ ID NO: 18 - protein, 445 aa, Artificial Sequence
  Description of Artificial Sequence: Synthetic polypeptide
EVQLVESGGGLVQPGGSLRLSCAASGFNIKDTYIHWVRQAPGKGLEWVARIYPTNGYTRYADSVKGRFTISADTSKNTAYLQMNSLRAEDTAVYYCSRWGGDGFYAMDYWGQGTLVTVSSASTKGPSVFPLAPSSKSTSGGTAALGCLVKDYFPEPVTVSWNSGALTSGVHTFPAVLQSSGLYSLSSVVTVPSSSLGTQTYICNVNHKPSNTKVDKKVEPKSCDKTHTCPPCPCCGPSVFLFRPALEDLLLGSEANVTCVVVDVSHEPEVKFNWYVDGVEVAKTKPREEQYCGCYRVVSVLPGLAQPWNHGKEYKCKVSNKALPAPIEKTISKAGQPREPEVHLLPPPSEELALNELVTLTCLARGFSPKDVLVRWLQGSQELPREKYLTWASRQEPSQGTTTFAVTSILRVAAEDWKKGDTFSCMVGHEALPLAFTQKTIDRLA

SEQ ID NO: 19 - protein, 452 aa, Artificial Sequence
  Description of Artificial Sequence: Synthetic polypeptide
EVQLVESGGGLVQPGGSLRLSCAASGFNIKDTYIHWVRQAPGKGLEWVARIYPTNGYTRYADSVKGRFTISADTSKNTAYLQMNSLRAEDTAVYYCSRWGGDGFYAMDYWGQGTLVTVSSASTKGPSVFPLAPSSKSTSGGTAALGCLVKDYFPEPVTVSWNSGALTSGVHTFPAVLQSSGLYSLSSVVTVPSSSLGTQTYICNVNHKPSNTKVDKKVEPKSCDKTHTCPPCPAPELLGGPSVFLFRPALEDLLLGSEANVTCVVVDVSHEDPEVKFNWYVDGVEVHNAKTKPREEQYASTYRVVSVLPGCAQPWNHGKEYKCKVSNKALPAPIEKTISKAGQPREPEVHLLPPPSEELALNELVTLTCLARGFSPKDVLVRWLQGSQELPREKYLTWASRQEPSQGTTTFAVTSILRVAAEDWKKGDTFSCMVGHEALPLAFTQKTIDRLA

SEQ ID NO: 20 - protein, 449 aa, Artificial Sequence
  Description of Artificial Sequence: Synthetic polypeptide
EVQLVESGGGLVQPGGSLRLSCAASGFNIKDTYIHWVRQAPGKGLEWVARIYPTNGYTRYADSVKGRFTISADTSKNTAYLQMNSLRAEDTAVYYCSRWGGDGFYAMDYWGQGTLVTVSSASTKGPSVFPLAPSSKSTSGGTAALGCLVKDYFPEPVTVSWNSGALTSGVHTFPAVLQSSGLYSLSSVVTVPSSSLGTQTYICNVNHKPSNTKVDKKVEPKSCDKTHTCPPCPAPELLGGPSVFLFRPALEDLLLGSEANVTCVVVDVSHEPEVKFNWYVDGVEVAKTKPREEQYNGTYRVVSVLPGCAQPWNHGKEYKCKVSNKALPAPIEKTISKAGQPREPEVHLLPPPSEELALNELVTLTCLARGFSPKDVLVRWLQGSQELPREKYLTWASRQEPSQGTTTFAVTSILRVAAEDWKKGDTFSCMVGHEALPLAFTQKTIDRLA

SEQ ID NO: 21 - protein, 442 aa, Artificial Sequence
  Description of Artificial Sequence: Synthetic polypeptide
EVQLVESGGGLVQPGGSLRLSCAASGFNIKDTYIHWVRQAPGKGLEWVARIYPTNGYTRYADSVKGRFTISADTSKNTAYLQMNSLRAEDTAVYYCSRWGGDGFYAMDYWGQGTLVTVSSASTKGPSVFPLAPSSKSTSGGTAALGCLVKDYFPEPVTVSWNSGALTSGVHTFPAVLQSSGLYSLSSVVTVPSSSLGTQTYICNVNHKPSNTKVDKKVEPKSCDKTHTCPPCGPSVFLFRPALEDLLLGSEANVTCVVVDVSHEPEVKFNWYVDGVEVAKTKPREEQYNGTYRVVSVLPGCAQPWNHGKEYKCKVSNKALPAPIEKTISKAGQPREPEVHLLPPPSEELALNELVTLTCLARGFSPKDVLVRWLQGSQELPREKYLTWASRQEPSQGTTTFAVTSILRVAAEDWKKGDTFSCMVGHEALPLAFTQKTIDRLA

SEQ ID NO: 22 - protein, 449 aa, Artificial Sequence
  Description of Artificial Sequence: Synthetic polypeptide
EVQLVESGGGLVQPGGSLRLSCAASGFNIKDTYIHWVRQAPGKGLEWVARIYPTNGYTRYADSVKGRFTISADTSKNTAYLQMNSLRAEDTAVYYCSRWGGDGFYAMDYWGQGTLVTVSSASTKGPSVFPLAPSSKSTSGGTAALGCLVKDYFPEPVTVSWNSGALTSGVHTFPAVLQSSGLYSLSSVVTVPSSSLGTQTYICNVNHKPSNTKVDKKVEPKSCDKTHTCPPCPAPELCCGPSVFLFRPALEDLLLGSEANVTCVVVDVSHEPEVKFNWYVDGVEVAKTKPREEQYCGCYRVVSVLPGCAQPWNHGKEYKCKVSNKALPAPIEKTISKAGQPREPEVHLLPPPSEELALNELVTLTCLARGFSPKDVLVRWLQGSQELPREKYLTWASRQEPSQGTTTFAVTSILRVAAEDWKKGDTFSCMVGHEALPLAFTQKTIDRLA

SEQ ID NO: 23 - protein, 445 aa, Artificial Sequence
  Description of Artificial Sequence: Synthetic polypeptide
EVQLVESGGGLVQPGGSLRLSCAASGFNIKDTYIHWVRQAPGKGLEWVARIYPTNGYTRYADSVKGRFTISADTSKNTAYLQMNSLRAEDTAVYYCSRWGGDGFYAMDYWGQGTLVTVSSASTKGPSVFPLAPSSKSTSGGTAALGCLVKDYFPEPVTVSWNSGALTSGVHTFPAVLQSSGLYSLSSVVTVPSSSLGTQTYICNVNHKPSNTKVDKKVEPKSCDKTHTCPPCPCCGPSVFLFRPALEDLLLGSEANVTCVVVDVSHEPEVKFNWYVDGVEVAKTKPREEQYCGCYRVVSVLPGCAQPWNHGKEYKCKVSNKALPAPIEKTISKAGQPREPEVHLLPPPSEELALNELVTLTCLARGFSPKDVLVRWLQGSQELPREKYLTWASRQEPSQGTTTFAVTSILRVAAEDWKKGDTFSCMVGHEALPLAFTQKTIDRLA

SEQ ID NO: 24 - protein, 437 aa, Artificial Sequence
  Description of Artificial Sequence: Synthetic polypeptide
EVQLVESGGGLVQPGGSLRLSCAASGFNIKDTYIHWVRQAPGKGLEWVARIYPTNGYTRYADSVKGRFTISADTSKNTAYLQMNSLRAEDTAVYYCSRWGGDGFYAMDYWGQGTLVTVSSASTKGPSVFPLAPSSKSTSGGTAALGCLVKDYFPEPVTVSWNSGALTSGVHTFPAVLQSSGLYSLSSVVTVPSSSLGTQTYICNVNHKPSNTKVDKKVEPKSCDKTHTCPPCPHPRLSLHRPALEDLLLGSEANLTCTLTGLRDASGATFTWTPSSGKSAVQGPPERDLCGCYSVSSVLPGCAQPWNHGETFTCTAAHPELKTPLTANISKAGQPREPQVYTLPPSRDELTKNQVSLTCLVKGFYPSDILVRWLQGSQELNNYKTTPPVLDSDGSFFLYSKLTVDKSRWQQGNTFSCMVGHEALPLAFTQKTLSLSP

SEQ ID NO: 25 - protein, 439 aa, Artificial Sequence
  Description of Artificial Sequence: Synthetic polypeptide
EVQLVESGGGLVQPGGSLRLSCAASGFNIKDTYIHWVRQAPGKGLEWVARIYPTNGYTRYADSVKGRFTISADTSKNTAYLQMNSLRAEDTAVYYCSRWGGDGFYAMDYWGQGTLVTVSSASTKGPSVFPLAPSSKSTSGGTAALGCLVKDYFPEPVTVSWNSGALTSGVHTFPAVLQSSGLYSLSSVVTVPSSSLGTQTYICNVNHKPSNTKVDKKVEPKSCDKTHTCPPCPHPRLSLHRPALEDLLLGSEANLTCTLTGLRDASGATFTWTPSSGKSAVQGPPERDLCGCYSVSSVLPGCAQPWNHGETFTCTAAHPELKTPLTANISKAGQPREPQVYTLPPSRDELTKNQVSLTCLVKGFYPSDILVRWLQGSQELPRENYKTTPPVLDSDGSFFLYSKLTVDKSRWQQGNTFSCMVGHEALPLAFTQKTLSLSP

SEQ ID NO: 26 - protein, 442 aa, Artificial Sequence
  Description of Artificial Sequence: Synthetic polypeptide
EVQLVESGGGLVQPGGSLRLSCAASGFNIKDTYIHWVRQAPGKGLEWVARIYPTNGYTRYADSVKGRFTISADTSKNTAYLQMNSLRAEDTAVYYCSRWGGDGFYAMDYWGQGTLVTVSSASTKGPSVFPLAPSSKSTSGGTAALGCLVKDYFPEPVTVSWNSGALTSGVHTFPAVLQSSGLYSLSSVVTVPSSSLGTQTYICNVNHKPSNTKVDKKVEPKSCDKTHTCPPCPHPRLSLHRPALEDLLLGSEANLTCTLTGLRDASGATFTWTPSSGKSAVQGPPERDLCGCYSVSSVLPGCAQPWNHGETFTCTAAHPELKTPLTANISKAGQPREPQVYTLPPSRDELTKNQVSLTCLVKGFYPSDILVRWLQGSQELPRENYKTTPPVLDSDQGTGSFFLYSKLTVDKSRWQQGNTFSCMVGHEALPLAFTQKTLSLSP

SEQ ID NO: 27 - protein, 443 aa, Artificial Sequence
  Description of Artificial Sequence: Synthetic polypeptide
EVQLVESGGGLVQPGGSLRLSCAASGFNIKDTYIHWVRQAPGKGLEWVARIYPTNGYTRYADSVKGRFTISADTSKNTAYLQMNSLRAEDTAVYYCSRWGGDGFYAMDYWGQGTLVTVSSASTKGPSVFPLAPSSKSTSGGTAALGCLVKDYFPEPVTVSWNSGALTSGVHTFPAVLQSSGLYSLSSVVTVPSSSLGTQTYICNVNHKPSNTKVDKKVEPKSCDKTHTCPPCPHPRLSLHRPALEDLLLGSEANLTCTLTGLRDASGATFTWTPSSGKSAVQGPPERDLCGCYSVSSVLPGCAQPWNHGETFTCTAAHPELKTPLTANISKAGQPREPQVYTLPPSRDELTLKNQVSLTCLVKGFYPSDILVRWLQGSQELPRENYKTTPPVLDSDQGTGSFFLYSKLTVDKSRWQQGNTFSCMVGHEALPLAFTQKTLSLSP

SEQ ID NO: 28 - protein, 449 aa, Artificial Sequence
  Description of Artificial Sequence: Synthetic polypeptide
EVQLVESGGGLVQPGGSLRLSCAASGFNIKDTYIHWVRQAPGKGLEWVARIYPTNGYTRYADSVKGRFTISADTSKNTAYLQMNSLRAEDTAVYYCSRWGGDGFYAMDYWGQGTLVTVSSASTKGPSVFPLAPSSKSTSGGTAALGCLVKDYFPEPVTVSWNSGALTSGVHTFPAVLQSSGLYSLSSVVTVPSSSLGTQTYICNVNHKPSNTKVDKKVEPKSCDKTHTCPPCPAPELLGGPSVFLFRPALEDLLLGSEANLTCTLTGLRDASGATFTWTPSSGKSAVQGPPERDLCGCYSVSSVLPGCAQPWNHGETFTCTAAHPELKTPLTANITKSGNTFRPEVHLLPPPSEELALNELVTLTCLARGFSPKDVLVRWLQGSQELPREKYLTWASRQEPSQGTTTFAVTSILRVAAEDWKKGDTFSCMVGHEALPLAFTQKTIDRLA

SEQ ID NO: 29 - protein, 445 aa, Artificial Sequence
  Description of Artificial Sequence: Synthetic polypeptide
EVQLVESGGGLVQPGGSLRLSCAASGFNIKDTYIHWVRQAPGKGLEWVARIYPTNGYTRYADSVKGRFTISADTSKNTAYLQMNSLRAEDTAVYYCSRWGGDGFYAMDYWGQGTLVTVSSASTKGPSVFPLAPSSKSTSGGTAALGCLVKDYFPEPVTVSWNSGALTSGVHTFPAVLQSSGLYSLSSVVTVPSSSLGTQTYICNVNHKPSNTKVDKKVEPKSCDKTHTCPPCPCCHPRLSLHRPALEDLLLGSEANVTCVVVDVSHASGATFTWTPSSGKSAVQGPPERDLCGCYSVSSVLPGCAQPWNHGETFTCTAAHPELKTPLTANITKSGNTFRPEVHLLPPPSEELALNELVTLTCLARGFSPKDVLVRWLQGSQELPREKYLTWASRQEPSQGTTTFAVTSILRVAAEDWKKGDTFSCMVGHEALPLAFTQKTIDRLA

SEQ ID NO: 30 - protein, 446 aa, Artificial Sequence
  Description of Artificial Sequence: Synthetic polypeptide
EVQLVESGGGLVQPGGSLRLSCAASGFNIKDTYIHWVRQAPGKGLEWVARIYPTNGYTRYADSVKGRFTISADTSKNTAYLQMNSLRAEDTAVYYCSRWGGDGFYAMDYWGQGTLVTVSSASTKGPSVFPLAPSSKSTSGGTAALGCLVKDYFPEPVTVSWNSGALTSGVHTFPAVLQSSGLYSLSSVVTVPSSSLGTQTYICNVNHKPSNTKVDKKVEPKSCDKTHTCPPCPCCHPRLSLHRPALEDLLLGSEANLTCTLTGLRDEDPEVKFNWYVDGGKSAVQGPPERDLCGCYSVSSVLPGCAQPWNHGETFTCTAAHPELKTPLTANITKSGNTFRPEVHLLPPPSEELALNELVTLTCLARGFSPKDVLVRWLQGSQELPREKYLTWASRQEPSQGTTTFAVTSILRVAAEDWKKGDTFSCMVGHEALPLAFTQKTIDRLA

SEQ ID NO: 31 - protein, 447 aa, Artificial Sequence
  Description of Artificial Sequence: Synthetic polypeptide
EVQLVESGGGLVQPGGSLRLSCAASGFNIKDTYIHWVRQAPGKGLEWVARIYPTNGYTRYADSVKGRFTISADTSKNTAYLQMNSLRAEDTAVYYCSRWGGDGFYAMDYWGQGTLVTVSSASTKGPSVFPLAPSSKSTSGGTAALGCLVKDYFPEPVTVSWNSGALTSGVHTFPAVLQSSGLYSLSSVVTVPSSSLGTQTYICNVNHKPSNTKVDKKVEPKSCDKTHTCPPCPCCHPRLSLHRPALEDLLLGSEANLTCTLTGLRDASGATFTWTPSSVEVHNAKTKPREEQYCGCYSVSSVLPGCAQPWNHGETFTCTAAHPELKTPLTANITKSGNTFRPEVHLLPPPSEELALNELVTLTCLARGFSPKDVLVRWLQGSQELPREKYLTWASRQEPSQGTTTFAVTSILRVAAEDWKKGDTFSCMVGHEALPLAFTQKTIDRLA

SEQ ID NO: 32 - protein, 443 aa, Artificial Sequence
  Description of Artificial Sequence: Synthetic polypeptide
EVQLVESGGGLVQPGGSLRLSCAASGFNIKDTYIHWVRQAPGKGLEWVARIYPTNGYTRYADSVKGRFTISADTSKNTAYLQMNSLRAEDTAVYYCSRWGGDGFYAMDYWGQGTLVTVSSASTKGPSVFPLAPSSKSTSGGTAALGCLVKDYFPEPVTVSWNSGALTSGVHTFPAVLQSSGLYSLSSVVTVPSSSLGTQTYICNVNHKPSNTKVDKKVEPKSCDKTHTCPPCPHPRLSLHRPALEDLLLGSEANLTCTLTGLRDASGATFTWTPSSGKSAVQGPPERDLNSTYRVVSVLPGCAQPWNHGETFTCTAAHPELKTPLTANITKSGNTFRPEVHLLPPPSEELALNELVTLTCLARGFSPKDVLVRWLQGSQELPREKYLTWASRQEPSQGTTTFAVTSILRVAAEDWKKGDTFSCMVGHEALPLAFTQKTIDRLA

SEQ ID NO: 33 - protein, 445 aa, Artificial Sequence
  Description of Artificial Sequence: Synthetic polypeptide
EVQLVESGGGLVQPGGSLRLSCAASGFNIKDTYIHWVRQAPGKGLEWVARIYPTNGYTRYADSVKGRFTISADTSKNTAYLQMNSLRAEDTAVYYCSRWGGDGFYAMDYWGQGTLVTVSSASTKGPSVFPLAPSSKSTSGGTAALGCLVKDYFPEPVTVSWNSGALTSGVHTFPAVLQSSGLYSLSSVVTVPSSSLGTQTYICNVNHKPSNTKVDKKVEPKSCDKTHTCPPCPCCHPRLSLHRPALEDLLLGSEANLTCTLTGLRDASGATFTWTPSSGKSAVQGPPERDLCGCYSVSSVLPGCAQPWNHGKEYKCKVSNKALKTPLTANITKSGNTFRPEVHLLPPPSEELALNELVTLTCLARGFSPKDVLVRWLQGSQELPREKYLTWASRQEPSQGTTTFAVTSILRVAAEDWKKGDTFSCMVGHEALPLAFTQKTIDRLA

SEQ ID NO: 34 - protein, 445 aa, Artificial Sequence
  Description of Artificial Sequence: Synthetic polypeptide
EVQLVESGGGLVQPGGSLRLSCAASGFNIKDTYIHWVRQAPGKGLEWVARIYPTNGYTRYADSVKGRFTISADTSKNTAYLQMNSLRAEDTAVYYCSRWGGDGFYAMDYWGQGTLVTVSSASTKGPSVFPLAPSSKSTSGGTAALGCLVKDYFPEPVTVSWNSGALTSGVHTFPAVLQSSGLYSLSSVVTVPSSSLGTQTYICNVNHKPSNTKVDKKVEPKSCDKTHTCPPCPCCHPRLSLHRPALEDLLLGSEANLTCTLTGLRDASGATFTWTPSSGKSAVQGPPERDLCGCYSVSSVLPGCAQPWNHGETFTCTAAHPELPAPIEKTITKSGNTFRPEVHLLPPPSEELALNELVTLTCLARGFSPKDVLVRWLQGSQELPREKYLTWASRQEPSQGTTTFAVTSILRVAAEDWKKGDTFSCMVGHEALPLAFTQKTIDRLA

SEQ ID NO: 35 - protein, 448 aa, Artificial Sequence
  Description of Artificial Sequence: Synthetic polypeptide
EVQLVESGGGLVQPGGSLRLSCAASGFNIKDTYIHWVRQAPGKGLEWVARIYPTNGYTRYADSVKGRFTISADTSKNTAYLQMNSLRAEDTAVYYCSRWGGDGFYAMDYWGQGTLVTVSSASTKGPSVFPLAPSSKSTSGGTAALGCLVKDYFPEPVTVSWNSGALTSGVHTFPAVLQSSGLYSLSSVVTVPSSSLGTQTYICNVNHKPSNTKVDKKVEPKSCDKTHTCPPCPCCHPRLSLHRPALEDLLLGSEANLTCTLTGLRDEDPEVKFNWYVDGVEVHNAKTKPREEQYCGCYSVSSVLPGCAQPWNHGETFTCTAAHPELKTPLTANITKSGNTFRPEVHLLPPPSEELALNELVTLTCLARGFSPKDVLVRWLQGSQELPREKYLTWASRQEPSQGTTTFAVTSILRVAAEDWKKGDTFSCMVGHEALPLAFTQKTIDRLA

SEQ ID NO: 36 - protein, 448 aa, Artificial Sequence
  Description of Artificial Sequence: Synthetic polypeptide
EVQLVESGGGLVQPGGSLRLSCAASGFNIKDTYIHWVRQAPGKGLEWVARIYPTNGYTRYADSVKGRFTISADTSKNTAYLQMNSLRAEDTAVYYCSRWGGDGFYAMDYWGQGTLVTVSSASTKGPSVFPLAPSSKSTSGGTAALGCLVKDYFPEPVTVSWNSGALTSGVHTFPAVLQSSGLYSLSSVVTVPSSSLGTQTYICNVNHKPSNTKVDKKVEPKSCDKTHTCPPCPCCHPRLSLHRPALEDLLLGSEANLTCTLTGLRDEDPEVKFNWYVDGVEVHNAKTKPREEQYCGCYSVSSVLPGCAQPWNHGETFTCTAAHPELPAPIEKTITKSGNTFRPEVHLLPPPSEELALNELVTLTCLARGFSPKDVLVRWLQGSQELPREKYLTWASRQEPSQGTTTFAVTSILRVAAEDWKKGDTFSCMVGHEALPLAFTQKTIDRLA

SEQ ID NO: 37 - protein, 446 aa, Artificial Sequence
  Description of Artificial Sequence: Synthetic polypeptide
EVQLVESGGGLVQPGGSLRLSCAASGFNIKDTYIHWVRQAPGKGLEWVARIYPTNGYTRYADSVKGRFTISADTSKNTAYLQMNSLRAEDTAVYYCSRWGGDGFYAMDYWGQGTLVTVSSASTKGPSVFPLAPSSKSTSGGTAALGCLVKDYFPEPVTVSWNSGALTSGVHTFPAVLQSSGLYSLSSVVTVPSSSLGTQTYICNVNHKPSNTKVDKKVEPKSCDKTHTCPPCPHPRLSLHRPALEDLLLGSEANLTCTLTGLRDEDPEVKFNWYVDGVEVHNAKTKPREEQYNSTYRVVSVLPGCAQPWNHGKEYKCKVSNKALPAPIEKTITKSGNTFRPEVHLLPPPSEELALNELVTLTCLARGFSPKDVLVRWLQGSQELPREKYLTWASRQEPSQGTTTFAVTSILRVAAEDWKKGDTFSCMVGHEALPLAFTQKTIDRLA

SEQ ID NO: 38 - protein, 452 aa, Artificial Sequence
  Description of Artificial Sequence: Synthetic polypeptide
EVQLVESGGGLVQPGGSLRLSCAASGFNIKDTYIHWVRQAPGKGLEWVARIYPTNGYTRYADSVKGRFTISADTSKNTAYLQMNSLRAEDTAVYYCSRWGGDGFYAMDYWGQGTLVTVSSASTKGPSVFPLAPSSKSTSGGTAALGCLVKDYFPEPVTVSWNSGALTSGVHTFPAVLQSSGLYSLSSVVTVPSSSLGTQTYICNVNHKPSNTKVDKKVEPKSCDKTHTCPPCPAPELLGGPSVFLFRPALEDLLLGSEANVTCVVVDVSHEDPEVKFNWYVDGVEVHNAKTKPREEQYCGCYSVSSVLPGCAQPWNHGETFTCTAAHPELPAPIEKTITKSGNTFRPEVHLLPPPSEELALNELVTLTCLARGFSPKDVLVRWLQGSQELPREKYLTWASRQEPSQGTTTFAVTSILRVAAEDWKKGDTFSCMVGHEALPLAFTQKTIDRLA

SEQ ID NO: 39 - protein, 449 aa, Artificial Sequence
  Description of Artificial Sequence: Synthetic polypeptide
EVQLVESGGGLVQPGGSLRLSCAASGFNIKDTYIHWVRQAPGKGLEWVARIYPTNGYTRYADSVKGRFTISADTSKNTAYLQMNSLRAEDTAVYYCSRWGGDGFYAMDYWGQGTLVTVSSASTKGPSVFPLAPSSKSTSGGTAALGCLVKDYFPEPVTVSWNSGALTSGVHTFPAVLQSSGLYSLSSVVTVPSSSLGTQTYICNVNHKPSNTKVDKKVEPKSCDKTHTCPPCPAPELLGGPSVFLFRPALEDLLLGSEANVTCVVVDVSHASGATFTWTPSSGKSAVQGPPERDLNSTYRVVSVLPGCAQPWNHGKEYKCKVSNKALKTPLTANITKSGNTFRPEVHLLPPPSEELALNELVTLTCLARGFSPKDVLVRWLQGSQELPREKYLTWASRQEPSQGTTTFAVTSILRVAAEDWKKGDTFSCMVGHEALPLAFTQKTIDRLA

SEQ ID NO: 40 - protein, 449 aa, Artificial Sequence
  Description of Artificial Sequence: Synthetic polypeptide
EVQLVESGGGLVQPGGSLRLSCAASGFNIKDTYIHWVRQAPGKGLEWVARIYPTNGYTRYADSVKGRFTISADTSKNTAYLQMNSLRAEDTAVYYCSRWGGDGFYAMDYWGQGTLVTVSSASTKGPSVFPLAPSSKSTSGGTAALGCLVKDYFPEPVTVSWNSGALTSGVHTFPAVLQSSGLYSLSSVVTVPSSSLGTQTYICNVNHKPSNTKVDKKVEPKSCDKTHTCPPCPAPELLGGPSVFLFRPALEDLLLGSEANVTCVVVDVSHASGATFTWTPSSGKSAVQGPPERDLCGCYSVSSVLPGCAQPWNHGETFTCTAAHPELKTPLTANITKSGNTFRPEVHLLPPPSEELALNELVTLTCLARGFSPKDVLVRWLQGSQELPREKYLTWASRQEPSQGTTTFAVTSILRVAAEDWKKGDTFSCMVGHEALPLAFTQKTIDRLA

SEQ ID NO: 41 - protein, 443 aa, Artificial Sequence
  Description of Artificial Sequence: Synthetic polypeptide
EVQLVESGGGLVQPGGSLRLSCAASGFNIKDTYIHWVRQAPGKGLEWVARIYPTNGYTRYADSVKGRFTISADTSKNTAYLQMNSLRAEDTAVYYCSRWGGDGFYAMDYWGQGTLVTVSSASTKGPSVFPLAPSSKSTSGGTAALGCLVKDYFPEPVTVSWNSGALTSGVHTFPAVLQSSGLYSLSSVVTVPSSSLGTQTYICNVNHKPSNTKVDKKVEPKSCDKTHTCPPCPHPRLSLHRPALEDLLLGSEANLTCTLTGLRDASGATFTWTPSSGKSAVQGPPERDLNSTYRVVSVLPGCAQPWNHGKEYKCKVSNKALKTPLTANITKSGNTFRPEVHLLPPPSEELALNELVTLTCLARGFSPKDVLVRWLQGSQELPREKYLTWASRQEPSQGTTTFAVTSILRVAAEDWKKGDTFSCMVGHEALPLAFTQKTIDRLA

SEQ ID NO: 42 - protein, 451 aa, Artificial Sequence
  Description of Artificial Sequence: Synthetic polypeptide
EVQLVESGGGLVQPGGSLRLSCAASGFNIKDTYIHWVRQAPGKGLEWVARIYPTNGYTRYADSVKGRFTISADTSKNTAYLQMNSLRAEDTAVYYCSRWGGDGFYAMDYWGQGTLVTVSSASTKGPSVFPLAPSSKSTSGGTAALGCLVKDYFPEPVTVSWNSGALTSGVHTFPAVLQSSGLYSLSSVVTVPSSSLGTQTYICNVNHKPSNTKVDKKVEPKSCDKTHTCPPCPAPELLGGPSVFLFRPALEDLLLGSEANVTCVVVDVSHASGATFTWTPSSVEVHNAKTKPREEQYNSTYRVVSVLPGCAQPWNHGETFTCTAAHPELKTPLTANITKSGNTFRPEVHLLPPPSEELALNELVTLTCLARGFSPKDVLVRWLQGSQELPREKYLTWASRQEPSQGTTTFAVTSILRVAAEDWKKGDTFSCMVGHEALPLAFTQKTIDRLA

SEQ ID NO: 43 - protein, 446 aa, Artificial Sequence
  Description of Artificial Sequence: Synthetic polypeptide
EVQLVESGGGLVQPGGSLRLSCAASGFNIKDTYIHWVRQAPGKGLEWVARIYPTNGYTRYADSVKGRFTISADTSKNTAYLQMNSLRAEDTAVYYCSRWGGDGFYAMDYWGQGTLVTVSSASTKGPSVFPLAPSSKSTSGGTAALGCLVKDYFPEPVTVSWNSGALTSGVHTFPAVLQSSGLYSLSSVVTVPSSSLGTQTYICNVNHKPSNTKVDKKVEPKSCDKTHTCPPCPCCHPRLSLHRPALEDLLLGSEANLTCTLTGLRDEDPEVKFNWYVDGGKSAVQGPPERDLCGCYSVSSVLPGCAQPWNHGKEYKCKVSNKALPAPIEKTITKSGNTFRPEVHLLPPPSEELALNELVTLTCLARGFSPKDVLVRWLQGSQELPREKYLTWASRQEPSQGTTTFAVTSILRVAAEDWKKGDTFSCMVGHEALPLAFTQKTIDRLA

SEQ ID NO: 44 - protein, 450 aa, Artificial Sequence
  Description of Artificial Sequence: Synthetic polypeptide
EVQLVESGGGLVQPGGSLRLSCAASGFNIKDTYIHWVRQAPGKGLEWVARIYPTNGYTRYADSVKGRFTISADTSKNTAYLQMNSLRAEDTAVYYCSRWGGDGFYAMDYWGQGTLVTVSSASTKGPSVFPLAPSSKSTSGGTAALGCLVKDYFPEPVTVSWNSGALTSGVHTFPAVLQSSGLYSLSSVVTVPSSSLGTQTYICNVNHKPSNTKVDKKVEPKSCDKTHTCPPCPAPELLGGPSLSLHRPALEDLLLGSEANLTCTLVDVSHEDPEVKFTWTPSSGKSAVTKPREEQYNSTYRVSSVLPGCAQPWNHGETFTCTVSNKALPAPLTANITKSGNTFRPEVHLLPPPSEELALNELVTLTCLARGFSPKDVLVRWLQGSQELPREKYLTWASRQEPSQGTTTFAVTSILRVAAEDWKKGDTFSCMVGHEALPLAFTQKTIDRLA

SEQ ID NO: 45 - protein, 447 aa, Artificial Sequence
  Description of Artificial Sequence: Synthetic polypeptide
EVQLVESGGGLVQPGGSLRLSCAASGFNIKDTYIHWVRQAPGKGLEWVARIYPTNGYTRYADSVKGRFTISADTSKNTAYLQMNSLRAEDTAVYYCSRWGGDGFYAMDYWGQGTLVTVSSASTKGPSVFPLAPSSKSTSGGTAALGCLVKDYFPEPVTVSWNSGALTSGVHTFPAVLQSSGLYSLSSVVTVPSSSLGTQTYICNVNHKPSNTKVDKKVEPKSCDKTHTCPPCPCCHPRVFLFRPALEDLLLGSEANVTCVVTGLRDASGATFNWYVDGVEVHNAKQGPPERDLCGCYSVVSVLPGCAQPWNHGKEYKCKAAHPELKTPIEKTITKSGNTFRPEVHLLPPPSEELALNELVTLTCLARGFSPKDVLVRWLQGSQELPREKYLTWASRQEPSQGTTTFAVTSILRVAAEDWKKGDTFSCMVGHEALPLAFTQKTIDRLA

SEQ ID NO: 46 - protein, 443 aa, Artificial Sequence
  Description of Artificial Sequence: Synthetic polypeptide
EVQLVESGGGLVQPGGSLRLSCAASGFNIKDTYIHWVRQAPGKGLEWVARIYPTNGYTRYADSVKGRFTISADTSKNTAYLQMNSLRAEDTAVYYCSRWGGDGFYAMDYWGQGTLVTVSSASTKGPSVFPLAPSSKSTSGGTAALGCLVKDYFPEPVTVSWNSGALTSGVHTFPAVLQSSGLYSLSSVVTVPSSSLGTQTYICNVNHKPSNTKVDKKVEPKSCDKTHTCPPCPHPRLSLHRPALEDLLLGSEANLTCTLTGLRDASGATFTWTPSSGKSAVQGPPERDLCGCYSVSSVLPGCAQPWNHGETFTCTAAHPELKTPLTANISKAGQPRRPQVYTLPPSRDELTLKNQVSLTCLVKGFYPSDILVRWLQGSQELPRENYKTTPPVLDSDQGTGSFFLYSKLTVDKSRWQQGNTFSCMVGHEALPLAFTQKTLSLSP

SEQ ID NO: 47 - protein, 443 aa, Artificial Sequence
  Description of Artificial Sequence: Synthetic polypeptide
EVQLVESGGGLVQPGGSLRLSCAASGFNIKDTYIHWVRQAPGKGLEWVARIYPTNGYTRYADSVKGRFTISADTSKNTAYLQMNSLRAEDTAVYYCSRWGGDGFYAMDYWGQGTLVTVSSASTKGPSVFPLAPSSKSTSGGTAALGCLVKDYFPEPVTVSWNSGALTSGVHTFPAVLQSSGLYSLSSVVTVPSSSLGTQTYICNVNHKPSNTKVDKKVEPKSCDKTHTCPPCPHPRLSLHRPALEDLLLGSEANLTCTLTGLRDASGATFTWTPSSGKSAVQGPPERDLCGCYSVSSVLPGCAQPWNHGETFTCTAAHPELKTPLTANISKAGQPREPEVYTLPPSRDELTLKNQVSLTCLVKGFYPSDILVRWLQGSQELPRENYKTTPPVLDSDQGTGSFFLYSKLTVDKSRWQQGNTFSCMVGHEALPLAFTQKTLSLSP

SEQ ID NO: 48 - protein, 443 aa, Artificial Sequence
  Description of Artificial Sequence: Synthetic polypeptide
EVQLVESGGGLVQPGGSLRLSCAASGFNIKDTYIHWVRQAPGKGLEWVARIYPTNGYTRYADSVKGRFTISADTSKNTAYLQMNSLRAEDTAVYYCSRWGGDGFYAMDYWGQGTLVTVSSASTKGPSVFPLAPSSKSTSGGTAALGCLVKDYFPEPVTVSWNSGALTSGVHTFPAVLQSSGLYSLSSVVTVPSSSLGTQTYICNVNHKPSNTKVDKKVEPKSCDKTHTCPPCPHPRLSLHRPALEDLLLGSEANLTCTLTGLRDASGATFTWTPSSGKSAVQGPPERDLCGCYSVSSVLPGCAQPWNHGETFTCTAAHPELKTPLTANISKAGQPRRPEVYTLPPSRDELTLKNQVSLTCLVKGFYPSDILVRWLQGSQELPRENYKTTPPVLDSDQGTGSFFLYSKLTVDKSRWQQGNTFSCMVGHEALPLAFTQKTLSLSP

SEQ ID NO: 49 - protein, 451 aa, Artificial Sequence
  Description of Artificial Sequence: Synthetic polypeptide
EVQLVESGGGLVQPGGSLRLSCAASGFNIKDTYIHWVRQAPGKGLEWVARIYPTNGYTRYADSVKGRFTISADTSKNTAYLQMNSLRAEDTAVYYCSRWGGDGFYAMDYWGQGTLVTVSSASTKGPSVFPLAPSSKSTSGGTAALGCLVKDYFPEPVTVSWNSGALTSGVHTFPAVLQSSGLYSLSSVVTVPSSSLGTQTYICNVNHKPSNTKVDKKVEPKSCDKTHTCPPCPAPELLGGPSVFLFRPALEDLLLGSEANVTCVVTGLRDASGATFNWYVDGVEVHNAKQGPPERDLCGCYSVVSVLPGCAQPWNHGKEYKCKAAHPELKTPIEKTITKSGNTFRPEVHLLPPPSEELALNELVTLTCLARGFSPKDVLVRWLQGSQELPREKYLTWASRQEPSQGTTTFAVTSILRVAAEDWKKGDTFSCMVGHEALPLAFTQKTIDRLA

SEQ ID NO: 50 - protein, 448 aa, Artificial Sequence
  Description of Artificial Sequence: Synthetic polypeptide
EVQLVESGGGLVQPGGSLRLSCAASGFNIKDTYIHWVRQAPGKGLEWVARIYPTNGYTRYADSVKGRFTISADTSKNTAYLQMNSLRAEDTAVYYCSRWGGDGFYAMDYWGQGTLVTVSSASTKGPSVFPLAPSSKSTSGGTAALGCLVKDYFPEPVTVSWNSGALTSGVHTFPAVLQSSGLYSLSSVVTVPSSSLGTQTYICNVNHKPSNTKVDKKVEPKSCDKTHTCPPCPCCHPRVFLFRPALEDLLLGSEANVTCVVTGLRDEDPEVKFNWYVDGVEVHNAKQGPPERDLCGCYSVVSVLPGCAQPWNHGKEYKCKAAHPELKTPIEKTITKSGNTFRPEVHLLPPPSEELALNELVTLTCLARGFSPKDVLVRWLQGSQELPREKYLTWASRQEPSQGTTTFAVTSILRVAAEDWKKGDTFSCMVGHEALPLAFTQKTIDRLA

SEQ ID NO: 51 - protein, 447 aa, Artificial Sequence
  Description of Artificial Sequence: Synthetic polypeptide
EVQLVESGGGLVQPGGSLRLSCAASGFNIKDTYIHWVRQAPGKGLEWVARIYPTNGYTRYADSVKGRFTISADTSKNTAYLQMNSLRAEDTAVYYCSRWGGDGFYAMDYWGQGTLVTVSSASTKGPSVFPLAPSSKSTSGGTAALGCLVKDYFPEPVTVSWNSGALTSGVHTFPAVLQSSGLYSLSSVVTVPSSSLGTQTYICNVNHKPSNTKVDKKVEPKSCDKTHTCPPCPCCHPRVFLFRPALEDLLLGSEANVTCVVTGLRDASGATFNWYVDGVEVHNAKTKPREEQYCGCYSVVSVLPGCAQPWNHGKEYKCKAAHPELKTPIEKTITKSGNTFRPEVHLLPPPSEELALNELVTLTCLARGFSPKDVLVRWLQGSQELPREKYLTWASRQEPSQGTTTFAVTSILRVAAEDWKKGDTFSCMVGHEALPLAFTQKTIDRLA

SEQ ID NO: 52 - protein, 447 aa, Artificial Sequence
  Description of Artificial Sequence: Synthetic polypeptide
EVQLVESGGGLVQPGGSLRLSCAASGFNIKDTYIHWVRQAPGKGLEWVARIYPTNGYTRYADSVKGRFTISADTSKNTAYLQMNSLRAEDTAVYYCSRWGGDGFYAMDYWGQGTLVTVSSASTKGPSVFPLAPSSKSTSGGTAALGCLVKDYFPEPVTVSWNSGALTSGVHTFPAVLQSSGLYSLSSVVTVPSSSLGTQTYICNVNHKPSNTKVDKKVEPKSCDKTHTCPPCPCCHPRVFLFRPALEDLLLGSEANVTCVVTGLRDASGATFNWYVDGVEVHNAKQGPPERDLCGCYSVVSVLPGCAQPWNHGKEYKCKVSNKALKTPIEKTITKSGNTFRPEVHLLPPPSEELALNELVTLTCLARGFSPKDVLVRWLQGSQELPREKYLTWASRQEPSQGTTTFAVTSILRVAAEDWKKGDTFSCMVGHEALPLAFTQKTIDRLA

SEQ ID NO: 53 - protein, 447 aa, Artificial Sequence
  Description of Artificial Sequence: Synthetic polypeptide
EVQLVESGGGLVQPGGSLRLSCAASGFNIKDTYIHWVRQAPGKGLEWVARIYPTNGYTRYADSVKGRFTISADTSKNTAYLQMNSLRAEDTAVYYCSRWGGDGFYAMDYWGQGTLVTVSSASTKGPSVFPLAPSSKSTSGGTAALGCLVKDYFPEPVTVSWNSGALTSGVHTFPAVLQSSGLYSLSSVVTVPSSSLGTQTYICNVNHKPSNTKVDKKVEPKSCDKTHTCPPCPCCHPRVFLFRPALEDLLLGSEANVTCVVTGLRDASGATFNWYVDGVEVHNAKQGPPERDLCGCYSVVSVLPGCAQPWNHGKEYKCKAAHPELPAPIEKTITKSGNTFRPEVHLLPPPSEELALNELVTLTCLARGFSPKDVLVRWLQGSQELPREKYLTWASRQEPSQGTTTFAVTSILRVAAEDWKKGDTFSCMVGHEALPLAFTQKTIDRLA

SEQ ID NO: 54 - protein, 452 aa, Artificial Sequence
  Description of Artificial Sequence: Synthetic polypeptide
EVQLVESGGGLVQPGGSLRLSCAASGFNIKDTYIHWVRQAPGKGLEWVARIYPTNGYTRYADSVKGRFTISADTSKNTAYLQMNSLRAEDTAVYYCSRWGGDGFYAMDYWGQGTLVTVSSASTKGPSVFPLAPSSKSTSGGTAALGCLVKDYFPEPVTVSWNSGALTSGVHTFPAVLQSSGLYSLSSVVTVPSSSLGTQTYICNVNHKPSNTKVDKKVEPKSCDKTHTCPPCPAPELLGGPSVFLFRPALEDLLLGSEANVTCVVTGLRDEDPEVKFNWYVDGVEVHNAKTKPREEQYCGCYSVVSVLPGCAQPWNHGKEYKCKAAHPELPAPIEKTITKSGNTFRPEVHLLPPPSEELALNELVTLTCLARGFSPKDVLVRWLQGSQELPREKYLTWASRQEPSQGTTTFAVTSILRVAAEDWKKGDTFSCMVGHEALPLAFTQKTIDRLA

SEQ ID NO: 55 - protein, 452 aa, Artificial Sequence
  Description of Artificial Sequence: Synthetic polypeptide
EVQLVESGGGLVQPGGSLRLSCAASGFNIKDTYIHWVRQAPGKGLEWVARIYPTNGYTRYADSVKGRFTISADTSKNTAYLQMNSLRAEDTAVYYCSRWGGDGFYAMDYWGQGTLVTVSSASTKGPSVFPLAPSSKSTSGGTAALGCLVKDYFPEPVTVSWNSGALTSGVHTFPAVLQSSGLYSLSSVVTVPSSSLGTQTYICNVNHKPSNTKVDKKVEPKSCDKTHTCPPCPAPELLGGPSVFLFRPALEDLLLGSEANVTCVVTGLRDEDPEVKFNWYVDGVEVHNAKTKPREEQYCGCYSVVSVLPGCAQPWNHGKEYKCKVSNKALPAPIEKTITKSGNTFRPEVHLLPPPSEELALNELVTLTCLARGFSPKDVLVRWLQGSQELPREKYLTWASRQEPSQGTTTFAVTSILRVAAEDWKKGDTFSCMVGHEALPLAFTQKTIDRLA

SEQ ID NO: 56 - protein, 448 aa, Artificial Sequence
  Description of Artificial Sequence: Synthetic polypeptide
EVQLVESGGGLVQPGGSLRLSCAASGFNIKDTYIHWVRQAPGKGLEWVARIYPTNGYTRYADSVKGRFTISADTSKNTAYLQMNSLRAEDTAVYYCSRWGGDGFYAMDYWGQGTLVTVSSASTKGPSVFPLAPSSKSTSGGTAALGCLVKDYFPEPVTVSWNSGALTSGVHTFPAVLQSSGLYSLSSVVTVPSSSLGTQTYICNVNHKPSNTKVDKKVEPKSCDKTHTCPPCPCCHPRVFLFRPALEDLLLGSEANVTCVVTGLRDEDPEVKFNWYVDGVEVHNAKTKPREEQYCGCYSVVSVLPGCAQPWNHGKEYKCKAAHPELPAPIEKTITKSGNTFRPEVHLLPPPSEELALNELVTLTCLARGFSPKDVLVRWLQGSQELPREKYLTWASRQEPSQGTTTFAVTSILRVAAEDWKKGDTFSCMVGHEALPLAFTQKTIDRLA

SEQ ID NO: 57 - protein, 448 aa, Artificial Sequence
  Description of Artificial Sequence: Synthetic polypeptide
EVQLVESGGGLVQPGGSLRLSCAASGFNIKDTYIHWVRQAPGKGLEWVARIYPTNGYTRYADSVKGRFTISADTSKNTAYLQMNSLRAEDTAVYYCSRWGGDGFYAMDYWGQGTLVTVSSASTKGPSVFPLAPSSKSTSGGTAALGCLVKDYFPEPVTVSWNSGALTSGVHTFPAVLQSSGLYSLSSVVTVPSSSLGTQTYICNVNHKPSNTKVDKKVEPKSCDKTHTCPPCPCCHPRVFLFRPALEDLLLGSEANVTCVVTGLRDEDPEVKFNWYVDGVEVHNAKTKPREEQYCGCYSVVSVLPGCAQPWNHGKEYKCKVSNKALPAPIEKTITKSGNTFRPEVHLLPPPSEELALNELVTLTCLARGFSPKDVLVRWLQGSQELPREKYLTWASRQEPSQGTTTFAVTSILRVAAEDWKKGDTFSCMVGHEALPLAFTQKTIDRLA

SEQ ID NO: 58 - protein, 443 aa, Artificial Sequence
  Description of Artificial Sequence: Synthetic polypeptide
EVQLVESGGGLVQPGGSLRLSCAASGFNIKDTYIHWVRQAPGKGLEWVARIYPTNGYTRYADSVKGRFTISADTSKNTAYLQMNSLRAEDTAVYYCSRWGGDGFYAMDYWGQGTLVTVSSASTKGPSVFPLAPSSKSTSGGTAALGCLVKDYFPEPVTVSWNSGALTSGVHTFPAVLQSSGLYSLSSVVTVPSSSLGTQTYICNVNHKPSNTKVDKKVEPKSCDKTHTCPPCPHPRLSLHRPALEDLLLGSEANLTCTLTGLRDASGATFTWTPSSGKSAVQGPPERDLCGCYSVSSVLPGCAQPWNHGETFTCTAAHPELKTPLTANISKAGQPREPQVYTLPPSRDELTLNELVTLTCLARGFSPKDVLVRWLQGSQELPREKYLTWASRQEPSQGTTTFAVTSILRVAAEDWKKGDTFSCMVGHEALPLAFTQKTIDRLA

SEQ ID NO: 59 - protein, 442 aa, Artificial Sequence
  Description of Artificial Sequence: Synthetic polypeptide
EVQLVESGGGLVQPGGSLRLSCAASGFNIKDTYIHWVRQAPGKGLEWVARIYPTNGYTRYADSVKGRFTISADTSKNTAYLQMNSLRAEDTAVYYCSRWGGDGFYAMDYWGQGTLVTVSSASTKGPSVFPLAPSSKSTSGGTAALGCLVKDYFPEPVTVSWNSGALTSGVHTFPAVLQSSGLYSLSSVVTVPSSSLGTQTYICNVNHKPSNTKVDKKVEPKSCDKTHTCPPCPHPRLSLHRPALEDLLLGSEANLTCTLTGLRDASGATFTWTPSSGKSAVQGPPERDLCGCYSVSSVLPGCAQPWNHGETFTCTAAHPELKTPLTANISKAGQPREPEVHLLPPPSEELAKNQVSLTCLVKGFYPKDVLVRWLQGSQELPREKYLTWASRQEPSQGTTTFAVTSILRVAAEDWKKGDTFSCMVGHEALPLAFTQKTIDRLA

SEQ ID NO: 60 - protein, 441 aa, Artificial Sequence
  Description of Artificial Sequence: Synthetic polypeptide
EVQLVESGGGLVQPGGSLRLSCAASGFNIKDTYIHWVRQAPGKGLEWVARIYPTNGYTRYADSVKGRFTISADTSKNTAYLQMNSLRAEDTAVYYCSRWGGDGFYAMDYWGQGTLVTVSSASTKGPSVFPLAPSSKSTSGGTAALGCLVKDYFPEPVTVSWNSGALTSGVHTFPAVLQSSGLYSLSSVVTVPSSSLGTQTYICNVNHKPSNTKVDKKVEPKSCDKTHTCPPCPHPRLSLHRPALEDLLLGSEANLTCTLTGLRDASGATFTWTPSSGKSAVQGPPERDLCGCYSVSSVLPGCAQPWNHGETFTCTAAHPELKTPLTANISKAGQPREPEVHLLPPPSEELALNELVTLTCLARGFSPSDIAVEWESNGQPENKYLTWASRQEPSQGTTTFAVTSILRVAAEDWKKGDTFSCMVGHEALPLAFTQKTIDRLA

SEQ ID NO: 61 - protein, 443 aa, Artificial Sequence
  Description of Artificial Sequence: Synthetic polypeptide
EVQLVESGGGLVQPGGSLRLSCAASGFNIKDTYIHWVRQAPGKGLEWVARIYPTNGYTRYADSVKGRFTISADTSKNTAYLQMNSLRAEDTAVYYCSRWGGDGFYAMDYWGQGTLVTVSSASTKGPSVFPLAPSSKSTSGGTAALGCLVKDYFPEPVTVSWNSGALTSGVHTFPAVLQSSGLYSLSSVVTVPSSSLGTQTYICNVNHKPSNTKVDKKVEPKSCDKTHTCPPCPHPRLSLHRPALEDLLLGSEANLTCTLTGLRDASGATFTWTPSSGKSAVQGPPERDLCGCYSVSSVLPGCAQPWNHGETFTCTAAHPELKTPLTANISKAGQPREPEVHLLPPPSEELALNELVTLTCLARGFSPSDIAVEWLQGSQELPREKYLTWASRQEPSQGTTTFAVTSILRVAAEDWKKGDTFSCMVGHEALPLAFTQKTIDRLA

SEQ ID NO: 62 - protein, 441 aa, Artificial Sequence
  Description of Artificial Sequence: Synthetic polypeptide
EVQLVESGGGLVQPGGSLRLSCAASGFNIKDTYIHWVRQAPGKGLEWVARIYPTNGYTRYADSVKGRFTISADTSKNTAYLQMNSLRAEDTAVYYCSRWGGDGFYAMDYWGQGTLVTVSSASTKGPSVFPLAPSSKSTSGGTAALGCLVKDYFPEPVTVSWNSGALTSGVHTFPAVLQSSGLYSLSSVVTVPSSSLGTQTYICNVNHKPSNTKVDKKVEPKSCDKTHTCPPCPHPRLSLHRPALEDLLLGSEANLTCTLTGLRDASGATFTWTPSSGKSAVQGPPERDLCGCYSVSSVLPGCAQPWNHGETFTCTAAHPELKTPLTANISKAGQPREPEVHLLPPPSEELALNELVTLTCLARGFSPKDVLVRWESNGQPENKYLTWASRQEPSQGTTTFAVTSILRVAAEDWKKGDTFSCMVGHEALPLAFTQKTIDRLA

SEQ ID NO: 63 - protein, 443 aa, Artificial Sequence
  Description of Artificial Sequence: Synthetic polypeptide
EVQLVESGGGLVQPGGSLRLSCAASGFNIKDTYIHWVRQAPGKGLEWVARIYPTNGYTRYADSVKGRFTISADTSKNTAYLQMNSLRAEDTAVYYCSRWGGDGFYAMDYWGQGTLVTVSSASTKGPSVFPLAPSSKSTSGGTAALGCLVKDYFPEPVTVSWNSGALTSGVHTFPAVLQSSGLYSLSSVVTVPSSSLGTQTYICNVNHKPSNTKVDKKVEPKSCDKTHTCPPCPHPRLSLHRPALEDLLLGSEANLTCTLTGLRDASGATFTWTPSSGKSAVQGPPERDLCGCYSVSSVLPGCAQPWNHGETFTCTAAHPELKTPLTANISKAGQPREPEVHLLPPPSEELALNELVTLTCLARGFSPKDVLVRWLQGSQELPRENYKTTPPVLDSDQGTTTFAVTSILRVAAEDWKKGDTFSCMVGHEALPLAFTQKTIDRLA

SEQ ID NO: 64 - protein, 443 aa, Artificial Sequence
  Description of Artificial Sequence: Synthetic polypeptide
EVQLVESGGGLVQPGGSLRLSCAASGFNIKDTYIHWVRQAPGKGLEWVARIYPTNGYTRYADSVKGRFTISADTSKNTAYLQMNSLRAEDTAVYYCSRWGGDGFYAMDYWGQGTLVTVSSASTKGPSVFPLAPSSKSTSGGTAALGCLVKDYFPEPVTVSWNSGALTSGVHTFPAVLQSSGLYSLSSVVTVPSSSLGTQTYICNVNHKPSNTKVDKKVEPKSCDKTHTCPPCPHPRLSLHRPALEDLLLGSEANLTCTLTGLRDASGATFTWTPSSGKSAVQGPPERDLCGCYSVSSVLPGCAQPWNHGETFTCTAAHPELKTPLTANISKAGQPREPEVHLLPPPSEELALNELVTLTCLARGFSPKDVLVRWLQGSQELPREKYLTWASRQEPSQGTGSFFLYSKLTVDAEDWKKGDTFSCMVGHEALPLAFTQKTIDRLA

SEQ ID NO: 65 - protein, 443 aa, Artificial Sequence
  Description of Artificial Sequence: Synthetic polypeptide
EVQLVESGGGLVQPGGSLRLSCAASGFNIKDTYIHWVRQAPGKGLEWVARIYPTNGYTRYADSVKGRFTISADTSKNTAYLQMNSLRAEDTAVYYCSRWGGDGFYAMDYWGQGTLVTVSSASTKGPSVFPLAPSSKSTSGGTAALGCLVKDYFPEPVTVSWNSGALTSGVHTFPAVLQSSGLYSLSSVVTVPSSSLGTQTYICNVNHKPSNTKVDKKVEPKSCDKTHTCPPCPHPRLSLHRPALEDLLLGSEANLTCTLTGLRDASGATFTWTPSSGKSAVQGPPERDLCGCYSVSSVLPGCAQPWNHGETFTCTAAHPELKTPLTANISKAGQPREPEVHLLPPPSEELALNELVTLTCLARGFSPKDVLVRWLQGSQELPREKYLTWASRQEPSQGTTTFAVTSILRVAKSRWQQGNTFSCMVGHEALPLAFTQKTIDRLA

SEQ ID NO: 66 - protein, 443 aa, Artificial Sequence
  Description of Artificial Sequence: Synthetic polypeptide
EVQLVESGGGLVQPGGSLRLSCAASGFNIKDTYIHWVRQAPGKGLEWVARIYPTNGYTRYADSVKGRFTISADTSKNTAYLQMNSLRAEDTAVYYCSRWGGDGFYAMDYWGQGTLVTVSSASTKGPSVFPLAPSSKSTSGGTAALGCLVKDYFPEPVTVSWNSGALTSGVHTFPAVLQSSGLYSLSSVVTVPSSSLGTQTYICNVNHKPSNTKVDKKVEPKSCDKTHTCPPCPHPRLSLHRPALEDLLLGSEANLTCTLTGLRDASGATFTWTPSSGKSAVQGPPERDLCGCYSVSSVLPGCAQPWNHGETFTCTAAHPELKTPLTANISKAGQPREPEVHLLPPPSEELALNELVTLTCLARGFSPKDVLVRWLQGSQELPREKYLTWASRQEPSQGTTTFAVTSILRVAAEDWKKGDVFSCSVMHEALPLAFTQKTIDRLA

SEQ ID NO: 67 - protein, 443 aa, Artificial Sequence
  Description of Artificial Sequence: Synthetic polypeptide
EVQLVESGGGLVQPGGSLRLSCAASGFNIKDTYIHWVRQAPGKGLEWVARIYPTNGYTRYADSVKGRFTISADTSKNTAYLQMNSLRAEDTAVYYCSRWGGDGFYAMDYWGQGTLVTVSSASTKGPSVFPLAPSSKSTSGGTAALGCLVKDYFPEPVTVSWNSGALTSGVHTFPAVLQSSGLYSLSSVVTVPSSSLGTQTYICNVNHKPSNTKVDKKVEPKSCDKTHTCPPCPHPRLSLHRPALEDLLLGSEANLTCTLTGLRDASGATFTWTPSSGKSAVQGPPERDLCGCYSVSSVLPGCAQPWNHGETFTCTAAHPELKTPLTANISKAGQPREPEVHLLPPPSEELALNELVTLTCLARGFSPKDVLVRWLQGSQELPREKYLTWASRQEPSQGTTTFAVTSILRVAAEDWKKGDTFSCMVGHEALHNHYTQKTIDRLA

SEQ ID NO: 68 - protein, 443 aa, Artificial Sequence
  Description of Artificial Sequence: Synthetic polypeptide
EVQLVESGGGLVQPGGSLRLSCAASGFNIKDTYIHWVRQAPGKGLEWVARIYPTNGYTRYADSVKGRFTISADTSKNTAYLQMNSLRAEDTAVYYCSRWGGDGFYAMDYWGQGTLVTVSSASTKGPSVFPLAPSSKSTSGGTAALGCLVKDYFPEPVTVSWNSGALTSGVHTFPAVLQSSGLYSLSSVVTVPSSSLGTQTYICNVNHKPSNTKVDKKVEPKSCDKTHTCPPCPHPRLSLHRPALEDLLLGSEANLTCTLTGLRDASGATFTWTPSSGKSAVQGPPERDLCGCYSVSSVLPGCAQPWNHGETFTCTAAHPELKTPLTANISKAGQPREPEVHLLPPPSEELALNELVTLTCLARGFSPKDVLVRWLQGSQELPREKYLTWASRQEPSQGTTTFAVTSILRVAAEDWKKGDTFSCMVGHEALPLAFTQKSLSLSP

SEQ ID NO: 69 - protein, 442 aa, Artificial Sequence
  Description of Artificial Sequence: Synthetic polypeptide
EVQLVESGGGLVQPGGSLRLSCAASGFNIKDTYIHWVRQAPGKGLEWVARIYPTNGYTRYADSVKGRFTISADTSKNTAYLQMNSLRAEDTAVYYCSRWGGDGFYAMDYWGQGTLVTVSSASTKGPSVFPLAPSSKSTSGGTAALGCLVKDYFPEPVTVSWNSGALTSGVHTFPAVLQSSGLYSLSSVVTVPSSSLGTQTYICNVNHKPSNTKVDKKVEPKSCDKTHTCPPCPHPRLSLHRPALEDLLLGSEANLTCTLTGLRDASGATFTWTPSSGKSAVQGPPERDLCGCYSVSSVLPGCAQPWNHGETFTCTAAHPELKTPLTANISKAGQPREPEVHLLPPSRDELTKNQVSLTCLARGFSPKDVLVRWLQGSQELPRENYKTWASRQEPSQGTTTFAVTSKLTVDKSRWQQGNVFSCMVGHEALPLAFTQKTLSLSP

SEQ ID NO: 70 - protein, 440 aa, Artificial Sequence
  Description of Artificial Sequence: Synthetic polypeptide
EVQLVESGGGLVQPGGSLRLSCAASGFNIKDTYIHWVRQAPGKGLEWVARIYPTNGYTRYADSVKGRFTISADTSKNTAYLQMNSLRAEDTAVYYCSRWGGDGFYAMDYWGQGTLVTVSSASTKGPSVFPLAPSSKSTSGGTAALGCLVKDYFPEPVTVSWNSGALTSGVHTFPAVLQSSGLYSLSSVVTVPSSSLGTQTYICNVNHKPSNTKVDKKVEPKSCDKTHTCPPCPHPRLSLHRPALEDLLLGSEANLTCTLTGLRDASGATFTWTPSSGKSAVQGPPERDLCGCYSVSSVLPGCAQPWNHGETFTCTAAHPELKTPLTANISKAGQPREPQVYTLPPPSEELALNELVTLTCLVKGFYPSDILVRWLQGSQELPREKYLTTPPVLDSDGSFFLYSILRVAAEDWKKGDTFSCMVGHEALPLAFTQKTIDRLA

SEQ ID NO: 71 - protein, 443 aa, Artificial Sequence
  Description of Artificial Sequence: Synthetic polypeptide
EVQLVESGGGLVQPGGSLRLSCAASGFNIKDTYIHWVRQAPGKGLEWVARIYPTNGYTRYADSVKGRFTISADTSKNTAYLQMNSLRAEDTAVYYCSRWGGDGFYAMDYWGQGTLVTVSSASTKGPSVFPLAPSSKSTSGGTAALGCLVKDYFPEPVTVSWNSGALTSGVHTFPAVLQSSGLYSLSSVVTVPSSSLGTQTYICNVNHKPSNTKVDKKVEPKSCDKTHTCPPCPHPRLSLHRPALEDLLLGSEANLTCTLTGLRDASGATFTWTPSSGKSAVQGPPERDLCGCYSVSSVLPGCAQPWNHGETFTCTAAHPELKTPLTANITKSGNTFRPEVHLLPPPSEELALNELVTLTCLARGFSPKDVLVRWLQGSQELPREKYLTWASRQEPSQGTTTFAVTSILRVAAEDWKKGDTFSCMVGHEALPLHYTQKTIDRLA

SEQ ID NO: 72 - protein, 443 aa, Artificial Sequence
  Description of Artificial Sequence: Synthetic polypeptide
EVQLVESGGGLVQPGGSLRLSCAASGFNIKDTYIHWVRQAPGKGLEWVARIYPTNGYTRYADSVKGRFTISADTSKNTAYLQMNSLRAEDTAVYYCSRWGGDGFYAMDYWGQGTLVTVSSASTKGPSVFPLAPSSKSTSGGTAALGCLVKDYFPEPVTVSWNSGALTSGVHTFPAVLQSSGLYSLSSVVTVPSSSLGTQTYICNVNHKPSNTKVDKKVEPKSCDKTHTCPPCPHPRLSLHRPALEDLLLGSEANLTCTLTGLRDASGATFTWTPSSGKSAVQGPPERDLCGCYSVSSVLPGCAQPWNHGETFTCTAAHPELKTPLTANITKSGNTFRPEVHLLPPPSEELALNELVTLTCLARGFSPKDVLVRWLQGSQELPREKYLTWASRQEPSQGTTTFAVTSILRVAAEDWKKGDTFSCMVGHEALHNHYTQKTIDRLA

SEQ ID NO: 73 - protein, 448 aa, Artificial Sequence
  Description of Artificial Sequence: Synthetic polypeptide
EVQLVESGGGLVQPGGSLRLSCAASGFNIKDTYIHWVRQAPGKGLEWVARIYPTNGYTRYADSVKGRFTISADTSKNTAYLQMNSLRAEDTAVYYCSRWGGDGFYAMDYWGQGTLVTVSSASTKGPSVFPLAPSSKSTSGGTAALGCLVKDYFPEPVTVSWNSGALTSGVHTFPAVLQSSGLYSLSSVVTVPSSSLGTQTYICNVNHKPSNTKVDKKVEPKSCDKTHTCPPCPCCHPRVFLFRPALEDLLLGSEANVTCVVVDVSHEDPEVKFNWYVDGVEVHNAKTKPREEQYCGCYSVVSVLPGCAQPWNHGKEYKCKAAHPELPAPIEKTITKSGNTFRPEVHLLPPPSEELALNELVTLTCLARGFSPKDVLVRWLQGSQELPREKYLTWASRQEPSQGTTTFAVTSILRVAAEDWKKGDTFSCMVGHEALPLAFTQKTIDRLA

SEQ ID NO: 74 - protein, 448 aa, Artificial Sequence
  Description of Artificial Sequence: Synthetic polypeptide
EVQLVESGGGLVQPGGSLRLSCAASGFNIKDTYIHWVRQAPGKGLEWVARIYPTNGYTRYADSVKGRFTISADTSKNTAYLQMNSLRAEDTAVYYCSRWGGDGFYAMDYWGQGTLVTVSSASTKGPSVFPLAPSSKSTSGGTAALGCLVKDYFPEPVTVSWNSGALTSGVHTFPAVLQSSGLYSLSSVVTVPSSSLGTQTYICNVNHKPSNTKVDKKVEPKSCDKTHTCPPCPCCHPRVFLFRPALEDLLLGSEANVTCVVVDVSHEDPEVKFNWYVDGVEVHNAKTKPREEQYCGCYSVVSVLPGCAQPWNHGKEYKCKVSNKALPAPIEKTITKSGNTFRPEVHLLPPPSEELALNELVTLTCLARGFSPKDVLVRWLQGSQELPREKYLTWASRQEPSQGTTTFAVTSILRVAAEDWKKGDTFSCMVGHEALPLAFTQKTIDRLA

SEQ ID NO: 75 - protein, 448 aa, Artificial Sequence
  Description of Artificial Sequence: Synthetic polypeptide
EVQLVESGGGLVQPGGSLRLSCAASGFNIKDTYIHWVRQAPGKGLEWVARIYPTNGYTRYADSVKGRFTISADTSKNTAYLQMNSLRAEDTAVYYCSRWGGDGFYAMDYWGQGTLVTVSSASTKGPSVFPLAPSSKSTSGGTAALGCLVKDYFPEPVTVSWNSGALTSGVHTFPAVLQSSGLYSLSSVVTVPSSSLGTQTYICNVNHKPSNTKVDKKVEPKSCDKTHTCPPCPCCHPRVFLFRPALEDLLLGSEANVTCVVTGLRDEDPEVKFNWYVDGVEVHNAKTKPREEQYNSTYRVVSVLPGCAQPWNHGKEYKCKAAHPELPAPIEKTITKSGNTFRPEVHLLPPPSEELALNELVTLTCLARGFSPKDVLVRWLQGSQELPREKYLTWASRQEPSQGTTTFAVTSILRVAAEDWKKGDTFSCMVGHEALPLAFTQKTIDRLA

SEQ ID NO: 76 - protein, 448 aa, Artificial Sequence
  Description of Artificial Sequence: Synthetic polypeptide
EVQLVESGGGLVQPGGSLRLSCAASGFNIKDTYIHWVRQAPGKGLEWVARIYPTNGYTRYADSVKGRFTISADTSKNTAYLQMNSLRAEDTAVYYCSRWGGDGFYAMDYWGQGTLVTVSSASTKGPSVFPLAPSSKSTSGGTAALGCLVKDYFPEPVTVSWNSGALTSGVHTFPAVLQSSGLYSLSSVVTVPSSSLGTQTYICNVNHKPSNTKVDKKVEPKSCDKTHTCPPCPCCHPRVFLFRPALEDLLLGSEANVTCVVTGLRDEDPEVKFNWYVDGVEVHNAKTKPREEQYNSTYRVVSVLPGCAQPWNHGKEYKCKVSNKALPAPIEKTITKSGNTFRPEVHLLPPPSEELALNELVTLTCLARGFSPKDVLVRWLQGSQELPREKYLTWASRQEPSQGTTTFAVTSILRVAAEDWKKGDTFSCMVGHEALPLAFTQKTIDRLA

SEQ ID NO: 77 - protein, 452 aa, Artificial Sequence
  Description of Artificial Sequence: Synthetic polypeptide
EVQLVESGGGLVQPGGSLRLSCAASGFNIKDTYIHWVRQAPGKGLEWVARIYPTNGYTRYADSVKGRFTISADTSKNTAYLQMNSLRAEDTAVYYCSRWGGDGFYAMDYWGQGTLVTVSSASTKGPSVFPLAPSSKSTSGGTAALGCLVKDYFPEPVTVSWNSGALTSGVHTFPAVLQSSGLYSLSSVVTVPSSSLGTQTYICNVNHKPSNTKVDKKVEPKSCDKTHTCPPCPAPELLGGPSVFLFRPALEDLLLGSEANVTCVVTGLRDEDPEVKFNWYVDGVEVHNAKTKPREEQYNSTYRVVSVLPGCAQPWNHGKEYKCKAAHPELPAPIEKTITKSGNTFRPEVHLLPPPSEELALNELVTLTCLARGFSPKDVLVRWLQGSQELPREKYLTWASRQEPSQGTTTFAVTSILRVAAEDWKKGDTFSCMVGHEALPLAFTQKTIDRLA

SEQ ID NO: 78 - protein, 452 aa, Artificial Sequence
  Description of Artificial Sequence: Synthetic polypeptide
EVQLVESGGGLVQPGGSLRLSCAASGFNIKDTYIHWVRQAPGKGLEWVARIYPTNGYTRYADSVKGRFTISADTSKNTAYLQMNSLRAEDTAVYYCSRWGGDGFYAMDYWGQGTLVTVSSASTKGPSVFPLAPSSKSTSGGTAALGCLVKDYFPEPVTVSWNSGALTSGVHTFPAVLQSSGLYSLSSVVTVPSSSLGTQTYICNVNHKPSNTKVDKKVEPKSCDKTHTCPPCPAPELLGGPSVFLFRPALEDLLLGSEANVTCVVTGLRDEDPEVKFNWYVDGVEVHNAKTKPREEQYNSTYRVVSVLPGCAQPWNHGKEYKCKVSNKALPAPIEKTITKSGNTFRPEVHLLPPPSEELALNELVTLTCLARGFSPKDVLVRWLQGSQELPREKYLTWASRQEPSQGTTTFAVTSILRVAAEDWKKGDTFSCMVGHEALPLAFTQKTIDRLA

SEQ ID NO: 79 - protein, 448 aa, Artificial Sequence
  Description of Artificial Sequence: Synthetic polypeptide
EVQLVESGGGLVQPGGSLRLSCAASGFNIKDTYIHWVRQAPGKGLEWVARIYPTNGYTRYADSVKGRFTISADTSKNTAYLQMNSLRAEDTAVYYCSRWGGDGFYAMDYWGQGTLVTVSSASTKGPSVFPLAPSSKSTSGGTAALGCLVKDYFPEPVTVSWNSGALTSGVHTFPAVLQSSGLYSLSSVVTVPSSSLGTQTYICNVNHKPSNTKVDKKVEPKSCDKTHTCPPCPCCHPRVFLFRPALEDLLLGSEANVTCVVTGLRDEDPEVKFNWYVDGVEVHNAKTKPREEQYCGCYSVVSVLTVLHQDWLNGKEYKCKAAHPELPAPIEKTITKSGNTFRPEVHLLPPPSEELALNELVTLTCLARGFSPKDVLVRWLQGSQELPREKYLTWASRQEPSQGTTTFAVTSILRVAAEDWKKGDTFSCMVGHEALPLAFTQKTIDRLA

SEQ ID NO: 80 - protein, 444 aa, Artificial Sequence
  Description of Artificial Sequence: Synthetic polypeptide
EVQLVESGGGLVQPGGSLRLSCAASGFNIKDTYIHWVRQAPGKGLEWVARIYPTNGYTRYADSVKGRFTISADTSKNTAYLQMNSLRAEDTAVYYCSRWGGDGFYAMDYWGQGTLVTVSSASTKGPSVFPLAPSSKSTSGGTAALGCLVKDYFPEPVTVSWNSGALTSGVHTFPAVLQSSGLYSLSSVVTVPSSSLGTQTYICNVNHKPSNTKVDKKVEPKSCDKTHTCPPCPCCHPRLSLHRPALEDLLLGSEANLTCTLTGLRDASGATFTWTPSSGKSAVQGPPERDLCGCYSVSSVLPGCAQPWNHGETFTCTAAHPELKTPLTANISKAGQPREPQVYTLPPSRDELTKNQVSLTCLVKGFYPKDVLVRWLQGSQELPRENYKTTPPVLDSDQGTTTFAVTSILRVAKSRWQQGNTFSCMVGHEALPLAFTQKTLSLSP

SEQ ID NO: 81 - protein, 444 aa, Artificial Sequence
  Description of Artificial Sequence: Synthetic polypeptide
EVQLVESGGGLVQPGGSLRLSCAASGFNIKDTYIHWVRQAPGKGLEWVARIYPTNGYTRYADSVKGRFTISADTSKNTAYLQMNSLRAEDTAVYYCSRWGGDGFYAMDYWGQGTLVTVSSASTKGPSVFPLAPSSKSTSGGTAALGCLVKDYFPEPVTVSWNSGALTSGVHTFPAVLQSSGLYSLSSVVTVPSSSLGTQTYICNVNHKPSNTKVDKKVEPKSCDKTHTCPPCPCCHPRLSLHRPALEDLLLGSEANLTCTLTGLRDASGATFTWTPSSGKSAVQGPPERDLCGCYSVSSVLPGCAQPWNHGETFTCTAAHPELKTPLTANISKAGQPREPQVYTLPPSRDELTKNQVSLTCLVKGFYPSDILVRWLQGSQELPRENYKTTPPVLDSDQGTTTFAVTSILRVAKSRWQQGNTFSCMVGHEALPLAFTQKTLSLSP

SEQ ID NO: 82 - protein, 444 aa, Artificial Sequence
  Description of Artificial Sequence: Synthetic polypeptide
EVQLVESGGGLVQPGGSLRLSCAASGFNIKDTYIHWVRQAPGKGLEWVARIYPTNGYTRYADSVKGRFTISADTSKNTAYLQMNSLRAEDTAVYYCSRWGGDGFYAMDYWGQGTLVTVSSASTKGPSVFPLAPSSKSTSGGTAALGCLVKDYFPEPVTVSWNSGALTSGVHTFPAVLQSSGLYSLSSVVTVPSSSLGTQTYICNVNHKPSNTKVDKKVEPKSCDKTHTCPPCPCCHPRLSLHRPALEDLLLGSEANLTCTLTGLRDASGATFTWTPSSGKSAVQGPPERDLCGCYSVSSVLPGCAQPWNHGETFTCTAAHPELKTPLTANISKAGQPREPQVYTLPPSRDELTKNQVSLTCLVKGFYPSDIAVRWLQGSQELPRENYKTTPPVLDSDQGTTTFAVTSILRVAKSRWQQGNTFSCMVGHEALPLAFTQKTLSLSP

SEQ ID NO: 83 - protein, 441 aa, Artificial Sequence
  Description of Artificial Sequence: Synthetic polypeptide
EVQLVESGGGLVQPGGSLRLSCAASGFNIKDTYIHWVRQAPGKGLEWVARIYPTNGYTRYADSVKGRFTISADTSKNTAYLQMNSLRAEDTAVYYCSRWGGDGFYAMDYWGQGTLVTVSSASTKGPSVFPLAPSSKSTSGGTAALGCLVKDYFPEPVTVSWNSGALTSGVHTFPAVLQSSGLYSLSSVVTVPSSSLGTQTYICNVNHKPSNTKVDKKVEPKSCDKTHTCPPCPCCHPRLSLHRPALEDLLLGSEANLTCTLTGLRDASGATFTWTPSSGKSAVQGPPERDLCGCYSVSSVLPGCAQPWNHGETFTCTAAHPELKTPLTANISKAGQPREPQVYTLPPSRDELTKNQVSLTCLVKGFYPKDVLVRWLQGSQELPRENYKTTPPVLDSDTTFAVTSILRVAKSRWQQGNTFSCMVGHEALPLAFTQKTLSLSP

SEQ ID NO: 84 - protein, 441 aa, Artificial Sequence
  Description of Artificial Sequence: Synthetic polypeptide
EVQLVESGGGLVQPGGSLRLSCAASGFNIKDTYIHWVRQAPGKGLEWVARIYPTNGYTRYADSVKGRFTISADTSKNTAYLQMNSLRAEDTAVYYCSRWGGDGFYAMDYWGQGTLVTVSSASTKGPSVFPLAPSSKSTSGGTAALGCLVKDYFPEPVTVSWNSGALTSGVHTFPAVLQSSGLYSLSSVVTVPSSSLGTQTYICNVNHKPSNTKVDKKVEPKSCDKTHTCPPCPCCHPRLSLHRPALEDLLLGSEANLTCTLTGLRDASGATFTWTPSSGKSAVQGPPERDLCGCYSVSSVLPGCAQPWNHGETFTCTAAHPELKTPLTANISKAGQPREPQVYTLPPSRDELTKNQVSLTCLVKGFYPKDVLVRWLQGSQELPRENYKTTPPVLDSDGSFFLYSILRVAKSRWQQGNTFSCMVGHEALPLAFTQKTLSLSP

SEQ ID NO: 85 - protein, 441 aa, Artificial Sequence
  Description of Artificial Sequence: Synthetic polypeptide
EVQLVESGGGLVQPGGSLRLSCAASGFNIKDTYIHWVRQAPGKGLEWVARIYPTNGYTRYADSVKGRFTISADTSKNTAYLQMNSLRAEDTAVYYCSRWGGDGFYAMDYWGQGTLVTVSSASTKGPSVFPLAPSSKSTSGGTAALGCLVKDYFPEPVTVSWNSGALTSGVHTFPAVLQSSGLYSLSSVVTVPSSSLGTQTYICNVNHKPSNTKVDKKVEPKSCDKTHTCPPCPCCHPRLSLHRPALEDLLLGSEANLTCTLTGLRDASGATFTWTPSSGKSAVQGPPERDLCGCYSVSSVLPGCAQPWNHGETFTCTAAHPELKTPLTANISKAGQPREPQVYTLPPSRDELTKNQVSLTCLVKGFYPSDIAVRWLQGSQELPRENYKTTPPVLDSDGSFFLYSILRVAKSRWQQGNTFSCMVGHEALPLAFTQKTLSLSP

SEQ ID NO: 86 - protein, 441 aa, Artificial Sequence
  Description of Artificial Sequence: Synthetic polypeptide
EVQLVESGGGLVQPGGSLRLSCAASGFNIKDTYIHWVRQAPGKGLEWVARIYPTNGYTRYADSVKGRFTISADTSKNTAYLQMNSLRAEDTAVYYCSRWGGDGFYAMDYWGQGTLVTVSSASTKGPSVFPLAPSSKSTSGGTAALGCLVKDYFPEPVTVSWNSGALTSGVHTFPAVLQSSGLYSLSSVVTVPSSSLGTQTYICNVNHKPSNTKVDKKVEPKSCDKTHTCPPCPCCHPRLSLHRPALEDLLLGSEANLTCTLTGLRDASGATFTWTPSSGKSAVQGPPERDLCGCYSVSSVLPGCAQPWNHGETFTCTAAHPELKTPLTANISKAGQPREPQVYTLPPSRDELTKNQVSLTCLVKGFYPKDVLVRWLQGSQELPRENYKTTPPVLDSDGSFFLYSKLTVDKSRWQQGNTFSCMVGHEALPLAFTQKTLSLSP

SEQ ID NO: 87 - protein, 445 aa, Artificial Sequence
  Description of Artificial Sequence: Synthetic polypeptide
EVQLVESGGGLVQPGGSLRLSCAASGFNIKDTYIHWVRQAPGKGLEWVARIYPTNGYTRYADSVKGRFTISADTSKNTAYLQMNSLRAEDTAVYYCSRWGGDGFYAMDYWGQGTLVTVSSASTKGPSVFPLAPSSKSTSGGTAALGCLVKDYFPEPVTVSWNSGALTSGVHTFPAVLQSSGLYSLSSVVTVPSSSLGTQTYICNVNHKPSNTKVDKKVEPKSCDKTHTCPPCPCCHPRLSLHRPALEDLLLGSEANLTCTLTGLRDASGATFTWTPSSGKSAVQGPPERDLCGCYSVSSVLPGCAQPWNHGETFTCTAAHPELKTPLTANISKAGQPFEPQVYLLPPPSEELALNELVSLTCLAKGFSPKDVLVRWLQGSQELPRENYKTTASVQEPSQGTTSFFVYSKLTVAAEDWKKGDTFSCMVGHEALPLAFTQKSISRSP

SEQ ID NO: 88 - protein, 444 aa, Artificial Sequence
  Description of Artificial Sequence: Synthetic polypeptide
EVQLVESGGGLVQPGGSLRLSCAASGFNIKDTYIHWVRQAPGKGLEWVARIYPTNGYTRYADSVKGRFTISADTSKNTAYLQMNSLRAEDTAVYYCSRWGGDGFYAMDYWGQGTLVTVSSASTKGPSVFPLAPSSKSTSGGTAALGCLVKDYFPEPVTVSWNSGALTSGVHTFPAVLQSSGLYSLSSVVTVPSSSLGTQTYICNVNHKPSNTKVDKKVEPKSCDKTHTCPPCPCCHPRLSLHRPALEDLLLGSEANLTCTLTGLRDASGATFTWTPSSGKSAVQGPPERDLCGCYSVSSVLPGCAQPWNHGETFTCTAAHPELKTPLTANISKAGQPFEPQVYLLPPSRDELTKNQVSLTCLAKGFSPKDVLVRWLQGSQELPRENYKTTASVQEPSQGTTSFFVYSKLTVAAEDWKKGDTFSCMVGHEALPLAFTQKSISRSP

SEQ ID NO: 89 - protein, 441 aa, Artificial Sequence
  Description of Artificial Sequence: Synthetic polypeptide
EVQLVESGGGLVQPGGSLRLSCAASGFNIKDTYIHWVRQAPGKGLEWVARIYPTNGYTRYADSVKGRFTISADTSKNTAYLQMNSLRAEDTAVYYCSRWGGDGFYAMDYWGQGTLVTVSSASTKGPSVFPLAPSSKSTSGGTAALGCLVKDYFPEPVTVSWNSGALTSGVHTFPAVLQSSGLYSLSSVVTVPSSSLGTQTYICNVNHKPSNTKVDKKVEPKSCDKTHTCPPCPCCHPRLSLHRPALEDLLLGSEANLTCTLTGLRDASGATFTWTPSSGKSAVQGPPERDLCGCYSVSSVLPGCAQPWNHGETFTCTAAHPELKTPLTANISKAGQPREPQVYLLPPSRDELTKNQVSLTCLAKGFYPKDVLVRWLQGSQELPRENYKTTASVLDSDGSFFVYSKLTVAAEDWKKGDTFSCMVGHEALPLAFTQKSISRSP

SEQ ID NO: 90 - protein, 442 aa, Artificial Sequence
  Description of Artificial Sequence: Synthetic polypeptide
EVQLVESGGGLVQPGGSLRLSCAASGFNIKDTYIHWVRQAPGKGLEWVARIYPTNGYTRYADSVKGRFTISADTSKNTAYLQMNSLRAEDTAVYYCSRWGGDGFYAMDYWGQGTLVTVSSASTKGPSVFPLAPSSKSTSGGTAALGCLVKDYFPEPVTVSWNSGALTSGVHTFPAVLQSSGLYSLSSVVTVPSSSLGTQTYICNVNHKPSNTKVDKKVEPKSCDKTHTCPPCPCCHPRLSLHRPALEDLLLGSEANLTCTLTGLRDASGATFTWTPSSGKSAVQGPPERDLCGCYSVSSVLPGCAQPWNHGETFTCTAAHPELKTPLTANISKAGQPREPQVYLLPPPSEELALNELVSLTCLAKGFYPKDVLVRWLQGSQELPRENYKTTASVLDSDGSFFVYSKLTVAAEDWKKGDTFSCMVGHEALPLAFTQKSISRSP

SEQ ID NO: 91 - protein, 442 aa, Artificial Sequence
  Description of Artificial Sequence: Synthetic polypeptide
EVQLVESGGGLVQPGGSLRLSCAASGFNIKDTYIHWVRQAPGKGLEWVARIYPTNGYTRYADSVKGRFTISADTSKNTAYLQMNSLRAEDTAVYYCSRWGGDGFYAMDYWGQGTLVTVSSASTKGPSVFPLAPSSKSTSGGTAALGCLVKDYFPEPVTVSWNSGALTSGVHTFPAVLQSSGLYSLSSVVTVPSSSLGTQTYICNVNHKPSNTKVDKKVEPKSCDKTHTCPPCPCCHPRLSLHRPALEDLLLGSEANLTCTLTGLRDASGATFTWTPSSGKSAVQGPPERDLCGCYSVSSVLPGCAQPWNHGETFTCTAAHPELKTPLTANISKAGQPREPQVYLLPPPSEELALNELVSLTCLAKGFYPKDVLVRWLQGSQELPRENYKTTASVLDSDGSFFVYSKLTVDKSRWQQGNVFSCMVGHEALPLAFTQKSISLSP

SEQ ID NO: 92 - protein, 445 aa, Artificial Sequence
  Description of Artificial Sequence: Synthetic polypeptide
EVQLVESGGGLVQPGGSLRLSCAASGFNIKDTYIHWVRQAPGKGLEWVARIYPTNGYTRYADSVKGRFTISADTSKNTAYLQMNSLRAEDTAVYYCSRWGGDGFYAMDYWGQGTLVTVSSASTKGPSVFPLAPSSKSTSGGTAALGCLVKDYFPEPVTVSWNSGALTSGVHTFPAVLQSSGLYSLSSVVTVPSSSLGTQTYICNVNHKPSNTKVDKKVEPKSCDKTHTCPPCPCCHPRLSLHRPALEDLLLGSEANLTCTLTGLRDASGATFTWTPSSGKSAVQGPPERDLCGCYSVSSVLPGCAQPWNHGETFTCTAAHPELKTPLTANISKAGQPFEPQVYLLPPPSEELALNELVSLTCLAKGFSPKDVLVRWLQGSQELPRENYKTTASVQEPSQGTTSFFVYSKLTVDKSRWQQGNVFSCMVGHEALPLAFTQKSISLSP

SEQ ID NO: 93 - protein, 444 aa, Artificial Sequence
  Description of Artificial Sequence: Synthetic polypeptide
EVQLVESGGGLVQPGGSLRLSCAASGFNIKDTYIHWVRQAPGKGLEWVARIYPTNGYTRYADSVKGRFTISADTSKNTAYLQMNSLRAEDTAVYYCSRWGGDGFYAMDYWGQGTLVTVSSASTKGPSVFPLAPSSKSTSGGTAALGCLVKDYFPEPVTVSWNSGALTSGVHTFPAVLQSSGLYSLSSVVTVPSSSLGTQTYICNVNHKPSNTKVDKKVEPKSCDKTHTCPPCPCCHPRLSLHRPALEDLLLGSEANLTCTLTGLRDASGATFTWTPSSGKSAVQGPPERDLCGCYSVSSVLPGCAQPWNHGETFTCTAAHPELKTPLTANISKAGQPFEPQVYLLPPSRDELTKNQVSLTCLAKGFSPKDVLVRWLQGSQELPRENYKTTASVQEPSQGTTSFFVYSKLTVDKSRWQQGNVFSCMVGHEALPLAFTQKSISLSP

SEQ ID NO: 94 - protein, 441 aa, Artificial Sequence
  Description of Artificial Sequence: Synthetic polypeptide
EVQLVESGGGLVQPGGSLRLSCAASGFNIKDTYIHWVRQAPGKGLEWVARIYPTNGYTRYADSVKGRFTISADTSKNTAYLQMNSLRAEDTAVYYCSRWGGDGFYAMDYWGQGTLVTVSSASTKGPSVFPLAPSSKSTSGGTAALGCLVKDYFPEPVTVSWNSGALTSGVHTFPAVLQSSGLYSLSSVVTVPSSSLGTQTYICNVNHKPSNTKVDKKVEPKSCDKTHTCPPCPCCHPRLSLHRPALEDLLLGSEANLTCTLTGLRDASGATFTWTPSSGKSAVQGPPERDLCGCYSVSSVLPGCAQPWNHGETFTCTAAHPELKTPLTANISKAGQPREPQVYLLPPSRDELTKNQVSLTCLAKGFYPKDVLVRWLQGSQELPRENYKTTASVLDSDGSFFVYSKLTVDKSRWQQGNVFSCMVGHEALPLAFTQKSISLSP

SEQ ID NO: 95 - protein, 444 aa, Artificial Sequence
  Description of Artificial Sequence: Synthetic polypeptide
EVQLVESGGGLVQPGGSLRLSCAASGFNIKDTYIHWVRQAPGKGLEWVARIYPTNGYTRYADSVKGRFTISADTSKNTAYLQMNSLRAEDTAVYYCSRWGGDGFYAMDYWGQGTLVTVSSASTKGPSVFPLAPSSKSTSGGTAALGCLVKDYFPEPVTVSWNSGALTSGVHTFPAVLQSSGLYSLSSVVTVPSSSLGTQTYICNVNHKPSNTKVDKKVEPKSCDKTHTCPPCPCCHPRLSLHRPALEDLLLGSEANLTCTLTGLRDASGATFTWTPSSGKSAVQGPPERDLCGCYSVSSVLPGCAQPWNHGETFTCTAAHPELKTPLTANITKSGNTFRPQVYLLPPSRDELTKNQVSLTCLAKGFSPKDVLVRWLQGSQELPRENYKTTASVQEPSQGTTTFFVYSKLTVDKSRWQQGNVFSCMVGHEALPLAFTQKSISLSP

SEQ ID NO: 96 - protein, 444 aa, Artificial Sequence
  Description of Artificial Sequence: Synthetic polypeptide
EVQLVESGGGLVQPGGSLRLSCAASGFNIKDTYIHWVRQAPGKGLEWVARIYPTNGYTRYADSVKGRFTISADTSKNTAYLQMNSLRAEDTAVYYCSRWGGDGFYAMDYWGQGTLVTVSSASTKGPSVFPLAPSSKSTSGGTAALGCLVKDYFPEPVTVSWNSGALTSGVHTFPAVLQSSGLYSLSSVVTVPSSSLGTQTYICNVNHKPSNTKVDKKVEPKSCDKTHTCPPCPCCHPRLSLHRPALEDLLLGSEANLTCTLTGLRDASGATFTWTPSSGKSAVQGPPERDLCGCYSVSSVLPGCAQPWNHGETFTCTAAHPELKTPLTANITKSGNTFRPQVYLLPPSRDELTKNQVSLTCLAKGFSPKDVLVRWLQGSQELPRENYKTTASVQEPSQGTTTFFVYSKLTVAAEDWKKGDTFSCMVGHEALPLAFTQKSISRSP

SEQ ID NO: 97 - protein, 445 aa, Artificial Sequence
  Description of Artificial Sequence: Synthetic polypeptide
EVQLVESGGGLVQPGGSLRLSCAASGFNIKDTYIHWVRQAPGKGLEWVARIYPTNGYTRYADSVKGRFTISADTSKNTAYLQMNSLRAEDTAVYYCSRWGGDGFYAMDYWGQGTLVTVSSASTKGPSVFPLAPSSKSTSGGTAALGCLVKDYFPEPVTVSWNSGALTSGVHTFPAVLQSSGLYSLSSVVTVPSSSLGTQTYICNVNHKPSNTKVDKKVEPKSCDKTHTCPPCPCCHPRLSLHRPALEDLLLGSEANLTCTLTGLRDASGATFTWTPSSGKSAVQGPPERDLCGCYSVSSVLPGCAQPWNHGETFTCTAAHPELKTPLTANITKSGNTFRPQVYLLPPPSEELALNELVSLTCLAKGFSPKDVLVRWLQGSQELPRENYKTTASVQEPSQGTTTFFVYSKLTVDKSRWQQGNVFSCMVGHEALPLAFTQKSISLSP

SEQ ID NO: 98 - protein, 445 aa, Artificial Sequence
  Description of Artificial Sequence: Synthetic polypeptide
EVQLVESGGGLVQPGGSLRLSCAASGFNIKDTYIHWVRQAPGKGLEWVARIYPTNGYTRYADSVKGRFTISADTSKNTAYLQMNSLRAEDTAVYYCSRWGGDGFYAMDYWGQGTLVTVSSASTKGPSVFPLAPSSKSTSGGTAALGCLVKDYFPEPVTVSWNSGALTSGVHTFPAVLQSSGLYSLSSVVTVPSSSLGTQTYICNVNHKPSNTKVDKKVEPKSCDKTHTCPPCPCCHPRLSLHRPALEDLLLGSEANLTCTLTGLRDASGATFTWTPSSGKSAVQGPPERDLCGCYSVSSVLPGCAQPWNHGETFTCTAAHPELKTPLTANITKSGNTFRPQVYLLPPPSEELALNELVSLTCLAKGFSPKDVLVRWLQGSQELPRENYKTTASVQEPSQGTTTFFVYSKLTVAAEDWKKGDTFSCMVGHEALPLAFTQKSISRSP

SEQ ID NO: 99 - protein, 445 aa, Artificial Sequence
  Description of Artificial Sequence: Synthetic polypeptide
EVQLVESGGGLVQPGGSLRLSCAASGFNIKDTYIHWVRQAPGKGLEWVARIYPTNGYTRYADSVKGRFTISADTSKNTAYLQMNSLRAEDTAVYYCSRWGGDGFYAMDYWGQGTLVTVSSASTKGPSVFPLAPSSKSTSGGTAALGCLVKDYFPEPVTVSWNSGALTSGVHTFPAVLQSSGLYSLSSVVTVPSSSLGTQTYICNVNHKPSNTKVDKKVEPKSCDKTHTCPPCPCCHPRLSLHRPALEDLLLGSEANLTCTLTGLRDASGATFTWTPSSGKSAVQGPPERDLCGCYSVSSVLPGCAQPWNHGETFTCTAAHPELKTPLTANITKSGNTFRPQVYLLPPPSEELALNELVSLTCLAKGFSPKDVLVRWLQGSQELPRENYKTTASVQEPSQGTTTFAVTSILRVAAEDWKKGDTFSCMVGHEALPLAFTQKSISRSP

SEQ ID NO: 100 - protein, 445 aa, Artificial Sequence
  Description of Artificial Sequence: Synthetic polypeptide
EVQLVESGGGLVQPGGSLRLSCAASGFNIKDTYIHWVRQAPGKGLEWVARIYPTNGYTRYADSVKGRFTISADTSKNTAYLQMNSLRAEDTAVYYCSRWGGDGFYAMDYWGQGTLVTVSSASTKGPSVFPLAPSSKSTSGGTAALGCLVKDYFPEPVTVSWNSGALTSGVHTFPAVLQSSGLYSLSSVVTVPSSSLGTQTYICNVNHKPSNTKVDKKVEPKSCDKTHTCPPCPCCHPRVFLFRPALEDLLLGSEANVTCVVTGLRDEDPEVKFNWYVDGVEVHNAKTKPREEQYCGCYSVVSVLPGCAQPWNHGKEYKCKAAHPELPAPIEKTISKAKGQPREPQVYTLPPSRDELTKNQVSLTCLVKGFYPSDILVRWLQGSQELPRENYKTTPPVLDSDGSFFLYSKLTVDKSRWQQGNTFSCMVGHEALPLAFTQKTLSLSP

SEQ ID NO: 101 - protein, 445 aa, Artificial Sequence
  Description of Artificial Sequence: Synthetic polypeptide
EVQLVESGGGLVQPGGSLRLSCAASGFNIKDTYIHWVRQAPGKGLEWVARIYPTNGYTRYADSVKGRFTISADTSKNTAYLQMNSLRAEDTAVYYCSRWGGDGFYAMDYWGQGTLVTVSSASTKGPSVFPLAPSSKSTSGGTAALGCLVKDYFPEPVTVSWNSGALTSGVHTFPAVLQSSGLYSLSSVVTVPSSSLGTQTYICNVNHKPSNTKVDKKVEPKSCDKTHTCPPCPCCHPRVFLFRPALEDLLLGSEANVTCVVTGLRDEDPEVKFNWYVDGVEVHNAKTKPREEQYCGCYSVVSVLPGCAQPWNHGKEYKCKAAHPELPAPIEKTISKAKGQPREPQVYLLPPSRDELTKNQVSLTCLAKGFYPKDVLVRWLQGSQELPRENYKTTASVLDSDGSFFVYSKLTVAAEDWKKGDTFSCMVGHEALPLAFTQKSISRSP

SEQ ID NO: 102 - protein, 445 aa, Artificial Sequence
  Description of Artificial Sequence: Synthetic polypeptide
EVQLVESGGGLVQPGGSLRLSCAASGFNIKDTYIHWVRQAPGKGLEWVARIYPTNGYTRYADSVKGRFTISADTSKNTAYLQMNSLRAEDTAVYYCSRWGGDGFYAMDYWGQGTLVTVSSASTKGPSVFPLAPSSKSTSGGTAALGCLVKDYFPEPVTVSWNSGALTSGVHTFPAVLQSSGLYSLSSVVTVPSSSLGTQTYICNVNHKPSNTKVDKKVEPKSCDKTHTCPPCPCCHPRVFLFRPALEDLLLGSEANVTCVVTGLRDEDPEVKFNWYVDGVEVHNAKTKPREEQYCGCYSVVSVLPGCAQPWNHGKEYKCKAAHPELPAPIEKTISKAKGQPREPQVYLLPPSRDELTKNQVSLTCLAKGFYPKDVLVRWLQGSQELPRENYKTTASVLDSDGSFFVYSKLTVDKSRWQQGNVFSCMVGHEALPLAFTQKSISLSP

SEQ ID NO: 103 - protein, 445 aa, Artificial Sequence
  Description of Artificial Sequence: Synthetic polypeptide
EVQLVESGGGLVQPGGSLRLSCAASGFNIKDTYIHWVRQAPGKGLEWVARIYPTNGYTRYADSVKGRFTISADTSKNTAYLQMNSLRAEDTAVYYCSRWGGDGFYAMDYWGQGTLVTVSSASTKGPSVFPLAPSSKSTSGGTAALGCLVKDYFPEPVTVSWNSGALTSGVHTFPAVLQSSGLYSLSSVVTVPSSSLGTQTYICNVNHKPSNTKVDKKVEPKSCDKTHTCPPCPCCHPRVFLFRPALEDLLLGSEANVTCVVTGLRDEDPEVKFNWYVDGVEVHNAKTKPREEQYCGCYSVVSVLTVLHQDWLNGKEYKCKAAHPELPAPIEKTISKAKGQPREPQVYTLPPSRDELTKNQVSLTCLVKGFYPSDILVRWLQGSQELPRENYKTTPPVLDSDGSFFLYSKLTVDKSRWQQGNTFSCMVGHEALPLAFTQKTLSLSP

SEQ ID NO: 104 - protein, 445 aa, Artificial Sequence
  Description of Artificial Sequence: Synthetic polypeptide
EVQLVESGGGLVQPGGSLRLSCAASGFNIKDTYIHWVRQAPGKGLEWVARIYPTNGYTRYADSVKGRFTISADTSKNTAYLQMNSLRAEDTAVYYCSRWGGDGFYAMDYWGQGTLVTVSSASTKGPSVFPLAPSSKSTSGGTAALGCLVKDYFPEPVTVSWNSGALTSGVHTFPAVLQSSGLYSLSSVVTVPSSSLGTQTYICNVNHKPSNTKVDKKVEPKSCDKTHTCPPCPCCHPRVFLFRPALEDLLLGSEANVTCVVTGLRDEDPEVKFNWYVDGVEVHNAKTKPREEQYCGCYSVVSVLTVLHQDWLNGKEYKCKAAHPELPAPIEKTISKAKGQPREPQVYLLPPSRDELTKNQVSLTCLAKGFYPKDVLVRWLQGSQELPRENYKTTASVLDSDGSFFVYSKLTVAAEDWKKGDTFSCMVGHEALPLAFTQKSISRSP

SEQ ID NO: 105 - protein, 445 aa, Artificial Sequence
  Description of Artificial Sequence: Synthetic polypeptide
EVQLVESGGGLVQPGGSLRLSCAASGFNIKDTYIHWVRQAPGKGLEWVARIYPTNGYTRYADSVKGRFTISADTSKNTAYLQMNSLRAEDTAVYYCSRWGGDGFYAMDYWGQGTLVTVSSASTKGPSVFPLAPSSKSTSGGTAALGCLVKDYFPEPVTVSWNSGALTSGVHTFPAVLQSSGLYSLSSVVTVPSSSLGTQTYICNVNHKPSNTKVDKKVEPKSCDKTHTCPPCPCCHPRVFLFRPALEDLLLGSEANVTCVVTGLRDEDPEVKFNWYVDGVEVHNAKTKPREEQYCGCYSVVSVLTVLHQDWLNGKEYKCKAAHPELPAPIEKTISKAKGQPREPQVYLLPPSRDELTKNQVSLTCLAKGFYPKDVLVRWLQGSQELPRENYKTTASVLDSDGSFFVYSKLTVDKSRWQQGNVFSCMVGHEALPLAFTQKSISLSP

SEQ ID NO: 106 - protein, 445 aa, Artificial Sequence
  Description of Artificial Sequence: Synthetic polypeptide
EVQLVESGGGLVQPGGSLRLSCAASGFNIKDTYIHWVRQAPGKGLEWVARIYPTNGYTRYADSVKGRFTISADTSKNTAYLQMNSLRAEDTAVYYCSRWGGDGFYAMDYWGQGTLVTVSSASTKGPSVFPLAPSSKSTSGGTAALGCLVKDYFPEPVTVSWNSGALTSGVHTFPAVLQSSGLYSLSSVVTVPSSSLGTQTYICNVNHKPSNTKVDKKVEPKSCDKTHTCPPCPCCHPRVFLFRPALEDLLLGSEANVTCVVTGLRDEDPEVKFNWYVDGVEVHNAKTKPREEQYCGCYSVVSVLPGCAQPWNHGKEYKCKVSNKALPAPIEKTISKAKGQPREPQVYTLPPSRDELTKNQVSLTCLVKGFYPSDILVRWLQGSQELPRENYKTTPPVLDSDGSFFLYSKLTVDKSRWQQGNTFSCMVGHEALPLAFTQKTLSLSP

SEQ ID NO: 107 - protein, 445 aa, Artificial Sequence
  Description of Artificial Sequence: Synthetic polypeptide
EVQLVESGGGLVQPGGSLRLSCAASGFNIKDTYIHWVRQAPGKGLEWVARIYPTNGYTRYADSVKGRFTISADTSKNTAYLQMNSLRAEDTAVYYCSRWGGDGFYAMDYWGQGTLVTVSSASTKGPSVFPLAPSSKSTSGGTAALGCLVKDYFPEPVTVSWNSGALTSGVHTFPAVLQSSGLYSLSSVVTVPSSSLGTQTYICNVNHKPSNTKVDKKVEPKSCDKTHTCPPCPCCHPRVFLFRPALEDLLLGSEANVTCVVTGLRDEDPEVKFNWYVDGVEVHNAKTKPREEQYCGCYSVVSVLPGCAQPWNHGKEYKCKVSNKALPAPIEKTISKAKGQPREPQVYLLPPSRDELTKNQVSLTCLAKGFYPKDVLVRWLQGSQELPRENYKTTASVLDSDGSFFVYSKLTVAAEDWKKGDTFSCMVGHEALPLAFTQKSISRSP

SEQ ID NO: 108 - protein, 445 aa, Artificial Sequence
  Description of Artificial Sequence: Synthetic polypeptide
EVQLVESGGGLVQPGGSLRLSCAASGFNIKDTYIHWVRQAPGKGLEWVARIYPTNGYTRYADSVKGRFTISADTSKNTAYLQMNSLRAEDTAVYYCSRWGGDGFYAMDYWGQGTLVTVSSASTKGPSVFPLAPSSKSTSGGTAALGCLVKDYFPEPVTVSWNSGALTSGVHTFPAVLQSSGLYSLSSVVTVPSSSLGTQTYICNVNHKPSNTKVDKKVEPKSCDKTHTCPPCPCCHPRVFLFRPALEDLLLGSEANVTCVVTGLRDEDPEVKFNWYVDGVEVHNAKTKPREEQYCGCYSVVSVLPGCAQPWNHGKEYKCKVSNKALPAPIEKTISKAKGQPREPQVYLLPPSRDELTKNQVSLTCLAKGFYPKDVLVRWLQGSQELPRENYKTTASVLDSDGSFFVYSKLTVDKSRWQQGNVFSCMVGHEALPLAFTQKSISLSP

SEQ ID NO: 109 - protein, 445 aa, Artificial Sequence
  Description of Artificial Sequence: Synthetic polypeptide
EVQLVESGGGLVQPGGSLRLSCAASGFNIKDTYIHWVRQAPGKGLEWVARIYPTNGYTRYADSVKGRFTISADTSKNTAYLQMNSLRAEDTAVYYCSRWGGDGFYAMDYWGQGTLVTVSSASTKGPSVFPLAPSSKSTSGGTAALGCLVKDYFPEPVTVSWNSGALTSGVHTFPAVLQSSGLYSLSSVVTVPSSSLGTQTYICNVNHKPSNTKVDKKVEPKSCDKTHTCPPCPCCHPRVFLFRPALEDLLLGSEANVTCVVTGLRDEDPEVKFNWYVDGVEVHNAKTKPREEQYCGCYSVVSVLTVLHQDWLNGKEYKCKVSNKALPAPIEKTISKAKGQPREPQVYTLPPSRDELTKNQVSLTCLVKGFYPSDILVRWLQGSQELPRENYKTTPPVLDSDGSFFLYSKLTVDKSRWQQGNTFSCMVGHEALPLAFTQKTLSLSP

SEQ ID NO: 110 - protein, 445 aa, Artificial Sequence
  Description of Artificial Sequence: Synthetic polypeptide
EVQLVESGGGLVQPGGSLRLSCAASGFNIKDTYIHWVRQAPGKGLEWVARIYPTNGYTRYADSVKGRFTISADTSKNTAYLQMNSLRAEDTAVYYCSRWGGDGFYAMDYWGQGTLVTVSSASTKGPSVFPLAPSSKSTSGGTAALGCLVKDYFPEPVTVSWNSGALTSGVHTFPAVLQSSGLYSLSSVVTVPSSSLGTQTYICNVNHKPSNTKVDKKVEPKSCDKTHTCPPCPCCHPRVFLFRPALEDLLLGSEANVTCVVTGLRDEDPEVKFNWYVDGVEVHNAKTKPREEQYCGCYSVVSVLTVLHQDWLNGKEYKCKVSNKALPAPIEKTISKAKGQPREPQVYLLPPSRDELTKNQVSLTCLAKGFYPKDVLVRWLQGSQELPRENYKTTASVLDSDGSFFVYSKLTVAAEDWKKGDTFSCMVGHEALPLAFTQKSISRSP

SEQ ID NO: 111 - protein, 445 aa, Artificial Sequence
  Description of Artificial Sequence: Synthetic polypeptide
EVQLVESGGGLVQPGGSLRLSCAASGFNIKDTYIHWVRQAPGKGLEWVARIYPTNGYTRYADSVKGRFTISADTSKNTAYLQMNSLRAEDTAVYYCSRWGGDGFYAMDYWGQGTLVTVSSASTKGPSVFPLAPSSKSTSGGTAALGCLVKDYFPEPVTVSWNSGALTSGVHTFPAVLQSSGLYSLSSVVTVPSSSLGTQTYICNVNHKPSNTKVDKKVEPKSCDKTHTCPPCPCCHPRVFLFRPALEDLLLGSEANVTCVVTGLRDEDPEVKFNWYVDGVEVHNAKTKPREEQYCGCYSVVSVLTVLHQDWLNGKEYKCKVSNKALPAPIEKTISKAKGQPREPQVYLLPPSRDELTKNQVSLTCLAKGFYPKDVLVRWLQGSQELPRENYKTTASVLDSDGSFFVYSKLTVDKSRWQQGNVFSCMVGHEALPLAFTQKSISLSP

SEQ ID NO: 112 - protein, 444 aa, Artificial Sequence
  Description of Artificial Sequence: Synthetic polypeptide
EVQLVESGGGLVQPGGSLRLSCAASGFNIKDTYIHWVRQAPGKGLEWVARIYPTNGYTRYADSVKGRFTISADTSKNTAYLQMNSLRAEDTAVYYCSRWGGDGFYAMDYWGQGTLVTVSSASTKGPSVFPLAPSSKSTSGGTAALGCLVKDYFPEPVTVSWNSGALTSGVHTFPAVLQSSGLYSLSSVVTVPSSSLGTQTYICNVNHKPSNTKVDKKVEPKSCDKTHTCPPCPCCHPRVFLFRPALEDLLLGSEANVTCVVTGLRDEDPEVKFNWYVDGVEVHNAKTKPREEQYCGCYSVVSVLPGCAQPWNHGKEYKCKAAHPELPAPIEKTISKAGQPREPQVYTLPPSRDELTKNQVSLTCLVKGFYPSDILVRWLQGSQELPRENYKTTPPVLDSDGSFFLYSKLTVDKSRWQQGNTFSCMVGHEALPLAFTQKTLSLSP

SEQ ID NO: 113 - protein, 444 aa, Artificial Sequence
  Description of Artificial Sequence: Synthetic polypeptide
EVQLVESGGGLVQPGGSLRLSCAASGFNIKDTYIHWVRQAPGKGLEWVARIYPTNGYTRYADSVKGRFTISADTSKNTAYLQMNSLRAEDTAVYYCSRWGGDGFYAMDYWGQGTLVTVSSASTKGPSVFPLAPSSKSTSGGTAALGCLVKDYFPEPVTVSWNSGALTSGVHTFPAVLQSSGLYSLSSVVTVPSSSLGTQTYICNVNHKPSNTKVDKKVEPKSCDKTHTCPPCPCCHPRVFLFRPALEDLLLGSEANVTCVVTGLRDEDPEVKFNWYVDGVEVHNAKTKPREEQYCGCYSVVSVLPGCAQPWNHGKEYKCKAAHPELPAPIEKTISKAGQPREPQVYLLPPSRDELTKNQVSLTCLAKGFYPKDVLVRWLQGSQELPRENYKTTASVLDSDGSFFVYSKLTVAAEDWKKGDTFSCMVGHEALPLAFTQKSISRSP

SEQ ID NO: 114 - protein, 444 aa, Artificial Sequence
  Description of Artificial Sequence: Synthetic polypeptide
EVQLVESGGGLVQPGGSLRLSCAASGFNIKDTYIHWVRQAPGKGLEWVARIYPTNGYTRYADSVKGRFTISADTSKNTAYLQMNSLRAEDTAVYYCSRWGGDGFYAMDYWGQGTLVTVSSASTKGPSVFPLAPSSKSTSGGTAALGCLVKDYFPEPVTVSWNSGALTSGVHTFPAVLQSSGLYSLSSVVTVPSSSLGTQTYICNVNHKPSNTKVDKKVEPKSCDKTHTCPPCPCCHPRVFLFRPALEDLLLGSEANVTCVVTGLRDEDPEVKFNWYVDGVEVHNAKTKPREEQYCGCYSVVSVLPGCAQPWNHGKEYKCKAAHPELPAPIEKTISKAGQPREPQVYLLPPSRDELTKNQVSLTCLAKGFYPKDVLVRWLQGSQELPRENYKTTASVLDSDGSFFVYSKLTVDKSRWQQGNVFSCMVGHEALPLAFTQKSISLSP

SEQ ID NO: 115 - protein, 444 aa, Artificial Sequence
  Description of Artificial Sequence: Synthetic polypeptide
EVQLVESGGGLVQPGGSLRLSCAASGFNIKDTYIHWVRQAPGKGLEWVARIYPTNGYTRYADSVKGRFTISADTSKNTAYLQMNSLRAEDTAVYYCSRWGGDGFYAMDYWGQGTLVTVSSASTKGPSVFPLAPSSKSTSGGTAALGCLVKDYFPEPVTVSWNSGALTSGVHTFPAVLQSSGLYSLSSVVTVPSSSLGTQTYICNVNHKPSNTKVDKKVEPKSCDKTHTCPPCPCCHPRVFLFRPALEDLLLGSEANVTCVVTGLRDEDPEVKFNWYVDGVEVHNAKTKPREEQYCGCYSVVSVLTVLHQDWLNGKEYKCKAAHPELPAPIEKTISKAGQPREPQVYTLPPSRDELTKNQVSLTCLVKGFYPSDILVRWLQGSQELPRENYKTTPPVLDSDGSFFLYSKLTVDKSRWQQGNTFSCMVGHEALPLAFTQKTLSLSP

SEQ ID NO: 116 - protein, 444 aa, Artificial Sequence
  Description of Artificial Sequence: Synthetic polypeptide
EVQLVESGGGLVQPGGSLRLSCAASGFNIKDTYIHWVRQAPGKGLEWVARIYPTNGYTRYADSVKGRFTISADTSKNTAYLQMNSLRAEDTAVYYCSRWGGDGFYAMDYWGQGTLVTVSSASTKGPSVFPLAPSSKSTSGGTAALGCLVKDYFPEPVTVSWNSGALTSGVHTFPAVLQSSGLYSLSSVVTVPSSSLGTQTYICNVNHKPSNTKVDKKVEPKSCDKTHTCPPCPCCHPRVFLFRPALEDLLLGSEANVTCVVTGLRDEDPEVKFNWYVDGVEVHNAKTKPREEQYCGCYSVVSVLTVLHQDWLNGKEYKCKAAHPELPAPIEKTISKAGQPREPQVYLLPPSRDELTKNQVSLTCLAKGFYPKDVLVRWLQGSQELPRENYKTTASVLDSDGSFFVYSKLTVAAEDWKKGDTFSCMVGHEALPLAFTQKSISRSP

SEQ ID NO: 117 - protein, 444 aa, Artificial Sequence
  Description of Artificial Sequence: Synthetic polypeptide
EVQLVESGGGLVQPGGSLRLSCAASGFNIKDTYIHWVRQAPGKGLEWVARIYPTNGYTRYADSVKGRFTISADTSKNTAYLQMNSLRAEDTAVYYCSRWGGDGFYAMDYWGQGTLVTVSSASTKGPSVFPLAPSSKSTSGGTAALGCLVKDYFPEPVTVSWNSGALTSGVHTFPAVLQSSGLYSLSSVVTVPSSSLGTQTYICNVNHKPSNTKVDKKVEPKSCDKTHTCPPCPCCHPRVFLFRPALEDLLLGSEANVTCVVTGLRDEDPEVKFNWYVDGVEVHNAKTKPREEQYCGCYSVVSVLTVLHQDWLNGKEYKCKAAHPELPAPIEKTISKAGQPREPQVYLLPPSRDELTKNQVSLTCLAKGFYPKDVLVRWLQGSQELPRENYKTTASVLDSDGSFFVYSKLTVDKSRWQQGNVFSCMVGHEALPLAFTQKSISLSP

SEQ ID NO: 118 - protein, 444 aa, Artificial Sequence
  Description of Artificial Sequence: Synthetic polypeptide
EVQLVESGGGLVQPGGSLRLSCAASGFNIKDTYIHWVRQAPGKGLEWVARIYPTNGYTRYADSVKGRFTISADTSKNTAYLQMNSLRAEDTAVYYCSRWGGDGFYAMDYWGQGTLVTVSSASTKGPSVFPLAPSSKSTSGGTAALGCLVKDYFPEPVTVSWNSGALTSGVHTFPAVLQSSGLYSLSSVVTVPSSSLGTQTYICNVNHKPSNTKVDKKVEPKSCDKTHTCPPCPCCHPRVFLFRPALEDLLLGSEANVTCVVTGLRDEDPEVKFNWYVDGVEVHNAKTKPREEQYCGCYSVVSVLPGCAQPWNHGKEYKCKVSNKALPAPIEKTISKAGQPREPQVYTLPPSRDELTKNQVSLTCLVKGFYPSDILVRWLQGSQELPRENYKTTPPVLDSDGSFFLYSKLTVDKSRWQQGNTFSCMVGHEALPLAFTQKTLSLSP

SEQ ID NO: 119 - protein, 444 aa, Artificial Sequence
  Description of Artificial Sequence: Synthetic polypeptide
EVQLVESGGGLVQPGGSLRLSCAASGFNIKDTYIHWVRQAPGKGLEWVARIYPTNGYTRYADSVKGRFTISADTSKNTAYLQMNSLRAEDTAVYYCSRWGGDGFYAMDYWGQGTLVTVSSASTKGPSVFPLAPSSKSTSGGTAALGCLVKDYFPEPVTVSWNSGALTSGVHTFPAVLQSSGLYSLSSVVTVPSSSLGTQTYICNVNHKPSNTKVDKKVEPKSCDKTHTCPPCPCCHPRVFLFRPALEDLLLGSEANVTCVVTGLRDEDPEVKFNWYVDGVEVHNAKTKPREEQYCGCYSVVSVLPGCAQPWNHGKEYKCKVSNKALPAPIEKTISKAGQPREPQVYLLPPSRDELTKNQVSLTCLAKGFYPKDVLVRWLQGSQELPRENYKTTASVLDSDGSFFVYSKLTVAAEDWKKGDTFSCMVGHEALPLAFTQKSISRSP

SEQ ID NO: 120 - protein, 444 aa, Artificial Sequence
  Description of Artificial Sequence: Synthetic polypeptide
EVQLVESGGGLVQPGGSLRLSCAASGFNIKDTYIHWVRQAPGKGLEWVARIYPTNGYTRYADSVKGRFTISADTSKNTAYLQMNSLRAEDTAVYYCSRWGGDGFYAMDYWGQGTLVTVSSASTKGPSVFPLAPSSKSTSGGTAALGCLVKDYFPEPVTVSWNSGALTSGVHTFPAVLQSSGLYSLSSVVTVPSSSLGTQTYICNVNHKPSNTKVDKKVEPKSCDKTHTCPPCPCCHPRVFLFRPALEDLLLGSEANVTCVVTGLRDEDPEVKFNWYVDGVEVHNAKTKPREEQYCGCYSVVSVLPGCAQPWNHGKEYKCKVSNKALPAPIEKTISKAGQPREPQVYLLPPSRDELTKNQVSLTCLAKGFYPKDVLVRWLQGSQELPRENYKTTASVLDSDGSFFVYSKLTVDKSRWQQGNVFSCMVGHEALPLAFTQKSISLSP

SEQ ID NO: 121 - protein, 444 aa, Artificial Sequence
  Description of Artificial Sequence: Synthetic polypeptide
EVQLVESGGGLVQPGGSLRLSCAASGFNIKDTYIHWVRQAPGKGLEWVARIYPTNGYTRYADSVKGRFTISADTSKNTAYLQMNSLRAEDTAVYYCSRWGGDGFYAMDYWGQGTLVTVSSASTKGPSVFPLAPSSKSTSGGTAALGCLVKDYFPEPVTVSWNSGALTSGVHTFPAVLQSSGLYSLSSVVTVPSSSLGTQTYICNVNHKPSNTKVDKKVEPKSCDKTHTCPPCPCCHPRVFLFRPALEDLLLGSEANVTCVVTGLRDEDPEVKFNWYVDGVEVHNAKTKPREEQYCGCYSVVSVLTVLHQDWLNGKEYKCKVSNKALPAPIEKTISKAGQPREPQVYTLPPSRDELTKNQVSLTCLVKGFYPSDILVRWLQGSQELPRENYKTTPPVLDSDGSFFLYSKLTVDKSRWQQGNTFSCMVGHEALPLAFTQKTLSLSP

SEQ ID NO: 122 - protein, 444 aa, Artificial Sequence
  Description of Artificial Sequence: Synthetic polypeptide
EVQLVESGGGLVQPGGSLRLSCAASGFNIKDTYIHWVRQAPGKGLEWVARIYPTNGYTRYADSVKGRFTISADTSKNTAYLQMNSLRAEDTAVYYCSRWGGDGFYAMDYWGQGTLVTVSSASTKGPSVFPLAPSSKSTSGGTAALGCLVKDYFPEPVTVSWNSGALTSGVHTFPAVLQSSGLYSLSSVVTVPSSSLGTQTYICNVNHKPSNTKVDKKVEPKSCDKTHTCPPCPCCHPRVFLFRPALEDLLLGSEANVTCVVTGLRDEDPEVKFNWYVDGVEVHNAKTKPREEQYCGCYSVVSVLTVLHQDWLNGKEYKCKVSNKALPAPIEKTISKAGQPREPQVYLLPPSRDELTKNQVSLTCLAKGFYPKDVLVRWLQGSQELPRENYKTTASVLDSDGSFFVYSKLTVAAEDWKKGDTFSCMVGHEALPLAFTQKSISRSP

SEQ ID NO: 123 - protein, 444 aa, Artificial Sequence
  Description of Artificial Sequence: Synthetic polypeptide
EVQLVESGGGLVQPGGSLRLSCAASGFNIKDTYIHWVRQAPGKGLEWVARIYPTNGYTRYADSVKGRFTISADTSKNTAYLQMNSLRAEDTAVYYCSRWGGDGFYAMDYWGQGTLVTVSSASTKGPSVFPLAPSSKSTSGGTAALGCLVKDYFPEPVTVSWNSGALTSGVHTFPAVLQSSGLYSLSSVVTVPSSSLGTQTYICNVNHKPSNTKVDKKVEPKSCDKTHTCPPCPCCHPRVFLFRPALEDLLLGSEANVTCVVTGLRDEDPEVKFNWYVDGVEVHNAKTKPREEQYCGCYSVVSVLTVLHQDWLNGKEYKCKVSNKALPAPIEKTISKAGQPREPQVYLLPPSRDELTKNQVSLTCLAKGFYPKDVLVRWLQGSQELPRENYKTTASVLDSDGSFFVYSKLTVDKSRWQQGNVFSCMVGHEALPLAFTQKSISLSP

SEQ ID NO: 124 - protein, 214 aa, Artificial Sequence
  Description of Artificial Sequence: Synthetic polypeptide
DIQMTQSPSSLSASVGDRVTITCRASQDVNTAVAWYQQKPGKAPKLLIYSASFLYSGVPSRFSGSRSGTDFTLTISSLQPEDFATYYCQQHYTTPPTFGQGTKVEIKRTVAAPSVFIFPPSDEQLKSGTASVVCLLNNFYPREAKVQWKVDNALQSGNSQESVTEQDSKDSTYSLSSTLTLSKADYEKHKVYACEVTHQGLSSPVTKSFNRGEC

SEQ ID NO: 125 - protein, 231 aa, Artificial Sequence
  Description of Artificial Sequence: Synthetic polypeptide
HHHHHHEPKSCDKTHTCPPCPHPRLSLHRPALEDLLLGSEANLTCTLTGLRDASGATFTWTPSSGKSAVQGPPERDLCGCYSVSSVLPGCAQPWNHGETFTCTAAHPELKTPLTANITKSGNTFRPEVHLLPPPSEELALNELVTLTCLARGFSPKDVLVRWLQGSQELPREKYLTWASRQEPSQGTTTFAVTSILRVAAEDWKKGDTFSCMVGHEALPLAFTQKTIDRLA

SEQ ID NO: 126 - protein, 232 aa, Artificial Sequence
  Description of Artificial Sequence: Synthetic polypeptide
HHHHHHEPKSCDKTHTCPPCPCCHPRVFLFRPALEDLLLGSEANVTCVVTGLRDEDPEVKFNWYVDGVEVHNAKTKPREEQYCGCYSVVSVLPGCAQPWNHGKEYKCKVSNKALPAPIEKTISKAGQPREPQVYLLPPSRDELTKNQVSLTCLAKGFYPKDVLVRWLQGSQELPRENYKTTASVLDSDGSFFVYSKLTVAAEDWKKGDTFSCMVGHEALPLAFTQKSISRSP

SEQ ID NO: 127 - protein, 232 aa, Artificial Sequence
  Description of Artificial Sequence: Synthetic polypeptide
HHHHHHEPKSCDKTHTCPPCPCCHPRVFLFRPALEDLLLGSEANVTCVVTGLRDEDPEVKFNWYVDGVEVHNAKTKPREEQYCGCYSVVSVLPGCAQPWNHGKEYKCKVSNKALPAPIEKTISKAGQPREPQVYLLPPSRDELTKNQVSLTCLAKGFYPKDVLVRWLQGSQELPRENYKTTASVLDSDGSFFVYSKLTVDKSRWQQGNVFSCMVGHEALPLAFTQKSISLSP

SEQ ID NO: 128 - protein, 232 aa, Artificial Sequence
  Description of Artificial Sequence: Synthetic polypeptide
HHHHHHEPKSCDKTHTCPPCPCCHPRVFLFRPALEDLLLGSEANVTCVVTGLRDEDPEVKFNWYVDGVEVHNAKTKPREEQYCGCYSVVSVLTVLHQDWLNGKEYKCKVSNKALPAPIEKTISKAGQPREPQVYLLPPSRDELTKNQVSLTCLAKGFYPKDVLVRWLQGSQELPRENYKTTASVLDSDGSFFVYSKLTVAAEDWKKGDTFSCMVGHEALPLAFTQKSISRSP

SEQ ID NO: 129 - protein, 232 aa, Artificial Sequence
  Description of Artificial Sequence: Synthetic polypeptide
HHHHHHEPKSCDKTHTCPPCPCCHPRVFLFRPALEDLLLGSEANVTCVVTGLRDEDPEVKFNWYVDGVEVHNAKTKPREEQYCGCYSVVSVLTVLHQDWLNGKEYKCKVSNKALPAPIEKTISKAGQPREPQVYLLPPSRDELTKNQVSLTCLAKGFYPKDVLVRWLQGSQELPRENYKTTASVLDSDGSFFVYSKLTVDKSRWQQGNVFSCMVGHEALPLAFTQKSISLSP

SEQ ID NO: 130 - protein, 460 aa, Artificial Sequence
  Description of Artificial Sequence: Synthetic polypeptide
EVQLVESGGGLVQPGGSLRLSCAASGFNIKDTYIHWVRQAPGKGLEWVARIYPTNGYTRYADSVKGRFTISADTSKNTAYLQMNSLRAEDTAVYYCSRWGGDGFYAMDYWGQGTLVTVSSASPTSPKVFPLSLDSTPQDGNVVVACLVQGFFPQEPLSVTWSESGQNVTARNFPPSQDASGDLYTTSSQLTLPATQCPDGKSVTCHVKHYTNPSQDVTVPCPVPPPPPCCHPRLSLHRPALEDLLLGSEANLTCTLTGLRDASGATFTWTPSSGKSAVQGPPERDLCGCYSVSSVLPGCAQPWNHGETFTCTAAHPELKTPLTANITKSGNTFRPEVHLLPPPSEELALNELVTLTCLARGFSPKDVLVRWLQGSQELPREKYLTWASRQEPSQGTTTFAVTSILRVAAEDWKKGDTFSCMVGHEALPLAFTQKTIDRLAGKPTHVNVSVVMAEVDGTCY

SEQ ID NO: 131 - protein, 460 aa, Artificial Sequence
  Description of Artificial Sequence: Synthetic polypeptide
EVQLVESGGGLVQPGGSLRLSCAASGFNIKDTYIHWVRQAPGKGLEWVARIYPTNGYTRYADSVKGRFTISADTSKNTAYLQMNSLRAEDTAVYYCSRWGGDGFYAMDYWGQGTLVTVSSASPTSPKVFPLSLDSTPQDGNVVVACLVQGFFPQEPLSVTWSESGQNVTARNFPPSQDASGDLYTTSSQLTLPATQCPDGKSVTCHVKHYTNPSQDVTVPCRVPPPPPCCHPRLSLHRPALEDLLLGSEANLTCTLTGLRDASGATFTWTPSSGKSAVQGPPERDLCGCYSVSSVLPGCAQPWNHGETFTCTAAHPELKTPLTANITKSGNTFRPEVHLLPPPSEELALNELVTLTCLARGFSPKDVLVRWLQGSQELPREKYLTWASRQEPSQGTTTFAVTSILRVAAEDWKKGDTFSCMVGHEALPLAFTQKTIDRLAGKPTHVNVSVVMAEVDGTCY

SEQ ID NO: 132 - protein, 444 aa, Artificial Sequence
  Description of Artificial Sequence: Synthetic polypeptide
EVQLVESGGGLVQPGGSLRLSCAASGFNIKDTYIHWVRQAPGKGLEWVARIYPTNGYTRYADSVKGRFTISADTSKNTAYLQMNSLRAEDTAVYYCSRWGGDGFYAMDYWGQGTLVTVSSASTKGPSVFPLAPSSKSTSGGTAALGCLVKDYFPEPVTVSWNSGALTSGVHTFPAVLQSSGLYSLSSVVTVPSSSLGTQTYICNVNHKPSNTKVDKKVEPKSCDKTHTCPPCPCCHPRVFLFRPALEDLLLGSEANVTCVVTGLRDEDPEVKFNWYVDGVEVHNAKTKPREEQYCGCYSVVSVLPGCAQPWNHGKEYKCKVSNKALPAPIEKTISKAGQPREPQVYLLPPCRDELTKNQVSLWCLAKGFYPKDVLVRWLQGSQELPRENYKTTASVLDSDGSFFVYSKLTVAAEDWKKGDTFSCMVGHEALPLAFTQKSISRSP

SEQ ID NO: 133 - protein, 444 aa, Artificial Sequence
  Description of Artificial Sequence: Synthetic polypeptide
EVQLVESGGGLVQPGGSLRLSCAASGFNIKDTYIHWVRQAPGKGLEWVARIYPTNGYTRYADSVKGRFTISADTSKNTAYLQMNSLRAEDTAVYYCSRWGGDGFYAMDYWGQGTLVTVSSASTKGPSVFPLAPSSKSTSGGTAALGCLVKDYFPEPVTVSWNSGALTSGVHTFPAVLQSSGLYSLSSVVTVPSSSLGTQTYICNVNHKPSNTKVDKKVEPKSCDKTHTCPPCPCCHPRVFLFRPALEDLLLGSEANVTCVVTGLRDEDPEVKFNWYVDGVEVHNAKTKPREEQYCGCYSVVSVLPGCAQPWNHGKEYKCKVSNKALPAPIEKTISKAGQPREPQVCLLPPSRDELTKNQVSLSCAAKGFYPKDVLVRWLQGSQELPRENYKTTASVLDSDGSFFVVSKLTVAAEDWKKGDTFSCMVGHEALPLAFTQKSISRSP

SEQ ID NO: 134 - protein, 444 aa, Artificial Sequence
  Description of Artificial Sequence: Synthetic polypeptide
EVQLVESGGGLVQPGGSLRLSCAASGFNIKDTYIHWVRQAPGKGLEWVARIYPTNGYTRYADSVKGRFTISADTSKNTAYLQMNSLRAEDTAVYYCSRWGGDGFYAMDYWGQGTLVTVSSASTKGPSVFPLAPSSKSTSGGTAALGCLVKDYFPEPVTVSWNSGALTSGVHTFPAVLQSSGLYSLSSVVTVPSSSLGTQTYICNVNHKPSNTKVDKKVEPKSCDKTHTCPPCPCCHPRVFLFRPALEDLLLGSEANVTCVVTGLRDEDPEVKFNWYVDGVEVHNAKTKPREEQYCGCYSVVSVLPGCAQPWNHGKEYKCKVSNKALPAPIEKTISKAGQPREPQVYLLPPCRDELTKNQVSLWCLAKGFYPKDVLVRWLQGSQELPRENYKTTASVLDSDGSFFVYSKLTVDKSRWQQGNVFSCMVGHEALPLAFTQKSISLSP

SEQ ID NO: 135 - protein, 444 aa, Artificial Sequence
  Description of Artificial Sequence: Synthetic polypeptide
EVQLVESGGGLVQPGGSLRLSCAASGFNIKDTYIHWVRQAPGKGLEWVARIYPTNGYTRYADSVKGRFTISADTSKNTAYLQMNSLRAEDTAVYYCSRWGGDGFYAMDYWGQGTLVTVSSASTKGPSVFPLAPSSKSTSGGTAALGCLVKDYFPEPVTVSWNSGALTSGVHTFPAVLQSSGLYSLSSVVTVPSSSLGTQTYICNVNHKPSNTKVDKKVEPKSCDKTHTCPPCPCCHPRVFLFRPALEDLLLGSEANVTCVVTGLRDEDPEVKFNWYVDGVEVHNAKTKPREEQYCGCYSVVSVLPGCAQPWNHGKEYKCKVSNKALPAPIEKTISKAGQPREPQVCLLPPSRDELTKNQVSLSCAAKGFYPKDVLVRWLQGSQELPRENYKTTASVLDSDGSFFVVSKLTVDKSRWQQGNVFSCMVGHEALPLAFTQKSISLSP

SEQ ID NO: 136 - protein, 444 aa, Artificial Sequence
  Description of Artificial Sequence: Synthetic polypeptide
EVQLVESGGGLVQPGGSLRLSCAASGFNIKDTYIHWVRQAPGKGLEWVARIYPTNGYTRYADSVKGRFTISADTSKNTAYLQMNSLRAEDTAVYYCSRWGGDGFYAMDYWGQGTLVTVSSASTKGPSVFPLAPSSKSTSGGTAALGCLVKDYFPEPVTVSWNSGALTSGVHTFPAVLQSSGLYSLSSVVTVPSSSLGTQTYICNVNHKPSNTKVDKKVEPKSCDKTHTCPPCPCCHPRVFLFRPALEDLLLGSEANVTCVVTGLRDEDPEVKFNWYVDGVEVHNAKTKPREEQYCGCYSVVSVLTVLHQDWLNGKEYKCKVSNKALPAPIEKTISKAGQPREPQVYLLPPCRDELTKNQVSLWCLAKGFYPKDVLVRWLQGSQELPRENYKTTASVLDSDGSFFVYSKLTVAAEDWKKGDTFSCMVGHEALPLAFTQKSISRSP

SEQ ID NO: 137 - protein, 444 aa, Artificial Sequence
  Description of Artificial Sequence: Synthetic polypeptide
EVQLVESGGGLVQPGGSLRLSCAASGFNIKDTYIHWVRQAPGKGLEWVARIYPTNGYTRYADSVKGRFTISADTSKNTAYLQMNSLRAEDTAVYYCSRWGGDGFYAMDYWGQGTLVTVSSASTKGPSVFPLAPSSKSTSGGTAALGCLVKDYFPEPVTVSWNSGALTSGVHTFPAVLQSSGLYSLSSVVTVPSSSLGTQTYICNVNHKPSNTKVDKKVEPKSCDKTHTCPPCPCCHPRVFLFRPALEDLLLGSEANVTCVVTGLRDEDPEVKFNWYVDGVEVHNAKTKPREEQYCGCYSVVSVLTVLHQDWLNGKEYKCKVSNKALPAPIEKTISKAGQPREPQVCLLPPSRDELTKNQVSLSCAAKGFYPKDVLVRWLQGSQELPRENYKTTASVLDSDGSFFVVSKLTVAAEDWKKGDTFSCMVGHEALPLAFTQKSISRSP

SEQ ID NO: 138 - protein, 444 aa, Artificial Sequence
  Description of Artificial Sequence: Synthetic polypeptide
EVQLVESGGGLVQPGGSLRLSCAASGFNIKDTYIHWVRQAPGKGLEWVARIYPTNGYTRYADSVKGRFTISADTSKNTAYLQMNSLRAEDTAVYYCSRWGGDGFYAMDYWGQGTLVTVSSASTKGPSVFPLAPSSKSTSGGTAALGCLVKDYFPEPVTVSWNSGALTSGVHTFPAVLQSSGLYSLSSVVTVPSSSLGTQTYICNVNHKPSNTKVDKKVEPKSCDKTHTCPPCPCCHPRVFLFRPALEDLLLGSEANVTCVVTGLRDEDPEVKFNWYVDGVEVHNAKTKPREEQYCGCYSVVSVLTVLHQDWLNGKEYKCKVSNKALPAPIEKTISKAGQPREPQVYLLPPCRDELTKNQVSLWCLAKGFYPKDVLVRWLQGSQELPRENYKTTASVLDSDGSFFVYSKLTVDKSRWQQGNVFSCMVGHEALPLAFTQKSISLSP

SEQ ID NO: 139 - protein, 444 aa, Artificial Sequence
  Description of Artificial Sequence: Synthetic polypeptide
EVQLVESGGGLVQPGGSLRLSCAASGFNIKDTYIHWVRQAPGKGLEWVARIYPTNGYTRYADSVKGRFTISADTSKNTAYLQMNSLRAEDTAVYYCSRWGGDGFYAMDYWGQGTLVTVSSASTKGPSVFPLAPSSKSTSGGTAALGCLVKDYFPEPVTVSWNSGALTSGVHTFPAVLQSSGLYSLSSVVTVPSSSLGTQTYICNVNHKPSNTKVDKKVEPKSCDKTHTCPPCPCCHPRVFLFRPALEDLLLGSEANVTCVVTGLRDEDPEVKFNWYVDGVEVHNAKTKPREEQYCGCYSVVSVLTVLHQDWLNGKEYKCKVSNKALPAPIEKTISKAGQPREPQVCLLPPSRDELTKNQVSLSCAAKGFYPKDVLVRWLQGSQELPRENYKTTASVLDSDGSFFVVSKLTVDKSRWQQGNVFSCMVGHEALPLAFTQKSISLSP

SEQ ID NO: 140 - protein, 442 aa, Artificial Sequence
  Description of Artificial Sequence: Synthetic polypeptide
EVQLVESGGGLVQPGGSLRLSCAASGFNIKDTYIHWVRQAPGKGLEWVARIYPTNGYTRYADSVKGRFTISADTSKNTAYLQMNSLRAEDTAVYYCSRWGGDGFYAMDYWGQGTLVTVSSASTKGPSVFPLAPSSKSTSGGTAALGCLVKDYFPEPVTVSWNSGALTSGVHTFPAVLQSSGLYSLSSVVTVPSSSLGTQTYICNVNHKPSNTKVDKKVEPKSCDKTHTCPPCPCCHPRVFLFRPALEDLLLGSEANVTCVVTGLRDEDPEVKFNWYVDGVEVHNAKTKPREEQYCGCYSVVSVLPGCAQPWNHGKEYKCKVSNKALPAPIEKTISKAGQPREPQVYTLPPCRDELTKNQVSLWCLVKGFYPSDIAVEWESNGQPENNYKTTPPVLDSDGSFFLYSKLTVDKSRWQQGNVFSCSVMHEALHNHYTQKSLSLSP

SEQ ID NO: 141 - protein, 442 aa, Artificial Sequence
  Description of Artificial Sequence: Synthetic polypeptide
EVQLVESGGGLVQPGGSLRLSCAASGFNIKDTYIHWVRQAPGKGLEWVARIYPTNGYTRYADSVKGRFTISADTSKNTAYLQMNSLRAEDTAVYYCSRWGGDGFYAMDYWGQGTLVTVSSASTKGPSVFPLAPSSKSTSGGTAALGCLVKDYFPEPVTVSWNSGALTSGVHTFPAVLQSSGLYSLSSVVTVPSSSLGTQTYICNVNHKPSNTKVDKKVEPKSCDKTHTCPPCPCCHPRVFLFRPALEDLLLGSEANVTCVVTGLRDEDPEVKFNWYVDGVEVHNAKTKPREEQYCGCYSVVSVLPGCAQPWNHGKEYKCKVSNKALPAPIEKTISKAGQPREPQVCTLPPSRDELTKNQVSLSCAVKGFYPSDIAVEWESNGQPENNYKTTPPVLDSDGSFFLVSKLTVDKSRWQQGNVFSCSVMHEALHNHYTQKSLSLSP

SEQ ID NO: 142 - protein, 442 aa, Artificial Sequence
  Description of Artificial Sequence: Synthetic polypeptide
EVQLVESGGGLVQPGGSLRLSCAASGFNIKDTYIHWVRQAPGKGLEWVARIYPTNGYTRYADSVKGRFTISADTSKNTAYLQMNSLRAEDTAVYYCSRWGGDGFYAMDYWGQGTLVTVSSASTKGPSVFPLAPSSKSTSGGTAALGCLVKDYFPEPVTVSWNSGALTSGVHTFPAVLQSSGLYSLSSVVTVPSSSLGTQTYICNVNHKPSNTKVDKKVEPKSCDKTHTCPPCPCCHPRVFLFRPALEDLLLGSEANVTCVVTGLRDEDPEVKFNWYVDGVEVHNAKTKPREEQYCGCYSVVSVLTVLHQDWLNGKEYKCKVSNKALPAPIEKTISKAGQPREPQVYTLPPCRDELTKNQVSLWCLVKGFYPSDIAVEWESNGQPENNYKTTPPVLDSDGSFFLYSKLTVDKSRWQQGNVFSCSVMHEALHNHYTQKSLSLSP

SEQ ID NO: 143 - protein, 442 aa, Artificial Sequence
  Description of Artificial Sequence: Synthetic polypeptide
EVQLVESGGGLVQPGGSLRLSCAASGFNIKDTYIHWVRQAPGKGLEWVARIYPTNGYTRYADSVKGRFTISADTSKNTAYLQMNSLRAEDTAVYYCSRWGGDGFYAMDYWGQGTLVTVSSASTKGPSVFPLAPSSKSTSGGTAALGCLVKDYFPEPVTVSWNSGALTSGVHTFPAVLQSSGLYSLSSVVTVPSSSLGTQTYICNVNHKPSNTKVDKKVEPKSCDKTHTCPPCPCCHPRVFLFRPALEDLLLGSEANVTCVVTGLRDEDPEVKFNWYVDGVEVHNAKTKPREEQYCGCYSVVSVLTVLHQDWLNGKEYKCKVSNKALPAPIEKTISKAGQPREPQVCTLPPSRDELTKNQVSLSCAVKGFYPSDIAVEWESNGQPENNYKTTPPVLDSDGSFFLVSKLTVDKSRWQQGNVFSCSVMHEALHNHYTQKSLSLSP

SEQ ID NO: 144 - protein, 443 aa, Artificial Sequence
  Description of Artificial Sequence: Synthetic polypeptide
EVQLVESGGGLVQPGGSLRLSCAASGFNIKDTYIHWVRQAPGKGLEWVARIYPTNGYTRYADSVKGRFTISADTSKNTAYLQMNSLRAEDTAVYYCSRWGGDGFYAMDYWGQGTLVTVSSASTKGPSVFPLAPSSKSTSGGTAALGCLVKDYFPEPVTVSWNSGALTSGVHTFPAVLQSSGLYSLSSVVTVPSSSLGTQTYICNVNHKPSNTKVDKKVEPKSCDKTHTCPPCPCCHPRVFLFPPKPKDTLMISRTPEVTCVVTGLRDEDPEVKFNWYVDGVEVHNAKTKPREEQYCGCYSVVSVLTVLHQDWLNGKEYKCKVSNKALPAPIEKTISKAGQPREPQVYTLPPCRDELTKNQVSLWCLVKGFYPSDIAVEWESNGQPENNYKTTPPVLDSDGSFFLYSKLTVDKSRWQQGNVFSCSVMHEALHNHYTQKSLSLSP

SEQ ID NO: 145 - protein, 443 aa, Artificial Sequence
  Description of Artificial Sequence: Synthetic polypeptide
EVQLVESGGGLVQPGGSLRLSCAASGFNIKDTYIHWVRQAPGKGLEWVARIYPTNGYTRYADSVKGRFTISADTSKNTAYLQMNSLRAEDTAVYYCSRWGGDGFYAMDYWGQGTLVTVSSASTKGPSVFPLAPSSKSTSGGTAALGCLVKDYFPEPVTVSWNSGALTSGVHTFPAVLQSSGLYSLSSVVTVPSSSLGTQTYICNVNHKPSNTKVDKKVEPKSCDKTHTCPPCPCCHPRVFLFPPKPKDTLMISRTPEVTCVVTGLRDEDPEVKFNWYVDGVEVHNAKTKPREEQYCGCYSVVSVLTVLHQDWLNGKEYKCKVSNKALPAPIEKTISKAGQPREPQVCTLPPSRDELTKNQVSLSCAVKGFYPSDIAVEWESNGQPENNYKTTPPVLDSDGSFFLVSKLTVDKSRWQQGNVFSCSVMHEALHNHYTQKSLSLSP

SEQ ID NO: 146 - protein, 448 aa, Artificial Sequence
  Description of Artificial Sequence: Synthetic polypeptide
EVQLVESGGGLVQPGGSLRLSCAASGFNIKDTYIHWVRQAPGKGLEWVARIYPTNGYTRYADSVKGRFTISADTSKNTAYLQMNSLRAEDTAVYYCSRWGGDGFYAMDYWGQGTLVTVSSASTKGPSVFPLAPSSKSTSGGTAALGCLVKDYFPEPVTVSWNSGALTSGVHTFPAVLQSSGLYSLSSVVTVPSSSLGTQTYICNVNHKPSNTKVDKKVEPKSCDKTHTCPPCPAPELLGGPSVFLFRPALEDLLLGSEANVTCVVVDVSHEDPEVKFNWYVDGVEVHNAKTKPREEQYNSTYRVVSVLPGCAQPWNHGKEYKCKVSNKALPAPIEKTISKAGQPREPQVYLLPPSRDELTKNQVSLTCLAKGFYPKDVLVRWLQGSQELPRENYKTTASVLDSDGSFFVYSKLTVAAEDWKKGDTFSCMVGHEALPLAFTQKSISRSP

SEQ ID NO: 147 - protein, 448 aa, Artificial Sequence
  Description of Artificial Sequence: Synthetic polypeptide
EVQLVESGGGLVQPGGSLRLSCAASGFNIKDTYIHWVRQAPGKGLEWVARIYPTNGYTRYADSVKGRFTISADTSKNTAYLQMNSLRAEDTAVYYCSRWGGDGFYAMDYWGQGTLVTVSSASTKGPSVFPLAPSSKSTSGGTAALGCLVKDYFPEPVTVSWNSGALTSGVHTFPAVLQSSGLYSLSSVVTVPSSSLGTQTYICNVNHKPSNTKVDKKVEPKSCDKTHTCPPCPAPELLGGPSVFLFRPALEDLLLGSEANVTCVVVDVSHEDPEVKFNWYVDGVEVHNAKTKPREEQYNSTYRVVSVLPGCAQPWNHGKEYKCKVSNKALPAPIEKTISKAGQPREPQVYLLPPSRDELTKNQVSLTCLAKGFYPKDVLVRWLQGSQELPRENYKTTASVLDSDGSFFVYSKLTVDKSRWQQGNVFSCMVGHEALPLAFTQKSISLSP

SEQ ID NO: 148 - protein, 448 aa, Artificial Sequence
  Description of Artificial Sequence: Synthetic polypeptide
EVQLVESGGGLVQPGGSLRLSCAASGFNIKDTYIHWVRQAPGKGLEWVARIYPTNGYTRYADSVKGRFTISADTSKNTAYLQMNSLRAEDTAVYYCSRWGGDGFYAMDYWGQGTLVTVSSASTKGPSVFPLAPSSKSTSGGTAALGCLVKDYFPEPVTVSWNSGALTSGVHTFPAVLQSSGLYSLSSVVTVPSSSLGTQTYICNVNHKPSNTKVDKKVEPKSCDKTHTCPPCPAPELLGGPSVFLFRPALEDLLLGSEANVTCVVVDVSHEDPEVKFNWYVDGVEVHNAKTKPREEQYNSTYRVVSVLTVLHQDWLNGKEYKCKVSNKALPAPIEKTISKAGQPREPQVYLLPPSRDELTKNQVSLTCLAKGFYPKDVLVRWLQGSQELPRENYKTTASVLDSDGSFFVYSKLTVAAEDWKKGDTFSCMVGHEALPLAFTQKSISRSP

SEQ ID NO: 149 - protein, 448 aa, Artificial Sequence
  Description of Artificial Sequence: Synthetic polypeptide
EVQLVESGGGLVQPGGSLRLSCAASGFNIKDTYIHWVRQAPGKGLEWVARIYPTNGYTRYADSVKGRFTISADTSKNTAYLQMNSLRAEDTAVYYCSRWGGDGFYAMDYWGQGTLVTVSSASTKGPSVFPLAPSSKSTSGGTAALGCLVKDYFPEPVTVSWNSGALTSGVHTFPAVLQSSGLYSLSSVVTVPSSSLGTQTYICNVNHKPSNTKVDKKVEPKSCDKTHTCPPCPAPELLGGPSVFLFRPALEDLLLGSEANVTCVVVDVSHEDPEVKFNWYVDGVEVHNAKTKPREEQYNSTYRVVSVLTVLHQDWLNGKEYKCKVSNKALPAPIEKTISKAGQPREPQVYLLPPSRDELTKNQVSLTCLAKGFYPKDVLVRWLQGSQELPRENYKTTASVLDSDGSFFVYSKLTVDKSRWQQGNVFSCMVGHEALPLAFTQKSISLSP

SEQ ID NO: 150 - protein, 448 aa, Artificial Sequence
  Description of Artificial Sequence: Synthetic polypeptide
EVQLVESGGGLVQPGGSLRLSCAASGFNIKDTYIHWVRQAPGKGLEWVARIYPTNGYTRYADSVKGRFTISADTSKNTAYLQMNSLRAEDTAVYYCSRWGGDGFYAMDYWGQGTLVTVSSASTKGPSVFPLAPSSKSTSGGTAALGCLVKDYFPEPVTVSWNSGALTSGVHTFPAVLQSSGLYSLSSVVTVPSSSLGTQTYICNVNHKPSNTKVDKKVEPKSCDKTHTCPPCPAPELLGGPDVFLFRPALEDLLLGSEANVTCVVVDVSHEDPEVKFNWYVDGVEVHNAKTKPREEQYNSTYRVVSVLPGCAQPWNHGKEYKCKVSNKALPAPEEKTISKAGQPREPQVYLLPPSRDELTKNQVSLTCLAKGFYPKDVLVRWLQGSQELPRENYKTTASVLDSDGSFFVYSKLTVAAEDWKKGDTFSCMVGHEALPLAFTQKSISRSP

SEQ ID NO: 151 - protein, 448 aa, Artificial Sequence
  Description of Artificial Sequence: Synthetic polypeptide
EVQLVESGGGLVQPGGSLRLSCAASGFNIKDTYIHWVRQAPGKGLEWVARIYPTNGYTRYADSVKGRFTISADTSKNTAYLQMNSLRAEDTAVYYCSRWGGDGFYAMDYWGQGTLVTVSSASTKGPSVFPLAPSSKSTSGGTAALGCLVKDYFPEPVTVSWNSGALTSGVHTFPAVLQSSGLYSLSSVVTVPSSSLGTQTYICNVNHKPSNTKVDKKVEPKSCDKTHTCPPCPAPELLGGPDVFLFRPALEDLLLGSEANVTCVVVDVSHEDPEVKFNWYVDGVEVHNAKTKPREEQYNSTYRVVSVLPGCAQPWNHGKEYKCKVSNKALPAPEEKTISKAGQPREPQVYLLPPSRDELTKNQVSLTCLAKGFYPKDVLVRWLQGSQELPRENYKTTASVLDSDGSFFVYSKLTVDKSRWQQGNVFSCMVGHEALPLAFTQKSISLSP

SEQ ID NO: 152 - protein, 448 aa, Artificial Sequence
  Description of Artificial Sequence: Synthetic polypeptide
EVQLVESGGGLVQPGGSLRLSCAASGFNIKDTYIHWVRQAPGKGLEWVARIYPTNGYTRYADSVKGRFTISADTSKNTAYLQMNSLRAEDTAVYYCSRWGGDGFYAMDYWGQGTLVTVSSASTKGPSVFPLAPSSKSTSGGTAALGCLVKDYFPEPVTVSWNSGALTSGVHTFPAVLQSSGLYSLSSVVTVPSSSLGTQTYICNVNHKPSNTKVDKKVEPKSCDKTHTCPPCPAPELLGGPDVFLFRPALEDLLLGSEANVTCVVVDVSHEDPEVKFNWYVDGVEVHNAKTKPREEQYNSTYRVVSVLTVLHQDWLNGKEYKCKVSNKALPAPEEKTISKAGQPREPQVYLLPPSRDELTKNQVSLTCLAKGFYPKDVLVRWLQGSQELPRENYKTTASVLDSDGSFFVYSKLTVAAEDWKKGDTFSCMVGHEALPLAFTQKSISRSP

SEQ ID NO: 153 - protein, 448 aa, Artificial Sequence
  Description of Artificial Sequence: Synthetic polypeptide
EVQLVESGGGLVQPGGSLRLSCAASGFNIKDTYIHWVRQAPGKGLEWVARIYPTNGYTRYADSVKGRFTISADTSKNTAYLQMNSLRAEDTAVYYCSRWGGDGFYAMDYWGQGTLVTVSSASTKGPSVFPLAPSSKSTSGGTAALGCLVKDYFPEPVTVSWNSGALTSGVHTFPAVLQSSGLYSLSSVVTVPSSSLGTQTYICNVNHKPSNTKVDKKVEPKSCDKTHTCPPCPAPELLGGPDVFLFRPALEDLLLGSEANVTCVVVDVSHEDPEVKFNWYVDGVEVHNAKTKPREEQYNSTYRVVSVLTVLHQDWLNGKEYKCKVSNKALPAPEEKTISKAGQPREPQVYLLPPSRDELTKNQVSLTCLAKGFYPKDVLVRWLQGSQELPRENYKTTASVLDSDGSFFVYSKLTVDKSRWQQGNVFSCMVGHEALPLAFTQKSISLSP

SEQ ID NO: 154 - protein, 443 aa, Artificial Sequence
  Description of Artificial Sequence: Synthetic polypeptide
EVQLVESGGGLVQPGGSLRLSCAASGFNIKDTYIHWVRQAPGKGLEWVARIYPTNGYTRYADSVKGRFTISADTSKNTAYLQMNSLRAEDTAVYYCSRWGGDGFYAMDYWGQGTLVTVSSASTKGPSVFPLAPSSKSTSGGTAALGCLVKDYFPEPVTVSWNSGALTSGVHTFPAVLQSSGLYSLSSVVTVPSSSLGTQTYICNVNHKPSNTKVDKKVEPKSCDKTHTCPPCPCCHPRVFLFPPKPKDTLMISRTPEVTCVVTGLRDEDPEVKFNWYVDGVEVHNAKTKPREEQYCGCYSVVSVLTVLHQDWLNGKEYKCKVSNKALPAPIEKTISKAGQPREPQVYTLPPCRDELTKNQVSLWCLVKGFYPSDIAVEWESNGQPENNYKTTPPVLDSDGSFFLYSKLTVDKSRWQQGNVFSCSVLHEALHSHYTQKSLSLSP

SEQ ID NO: 155 - protein, 448 aa, Artificial Sequence
  Description of Artificial Sequence: Synthetic polypeptide
EVQLVESGGGLVQPGGSLRLSCAASGFNIKDTYIHWVRQAPGKGLEWVARIYPTNGYTRYADSVKGRFTISADTSKNTAYLQMNSLRAEDTAVYYCSRWGGDGFYAMDYWGQGTLVTVSSASTKGPSVFPLAPSSKSTSGGTAALGCLVKDYFPEPVTVSWNSGALTSGVHTFPAVLQSSGLYSLSSVVTVPSSSLGTQTYICNVNHKPSNTKVDKKVEPKSCDKTHTCPPCPAPELLGGPSVFLFRPALEDLLLGSEANVTCVVVDVSHEDPEVKFNWYVDGVEVHNAKTKPREEQYNSTYRVVSVLPGCAQPWNHGKEYKCKVSNKALPAPIEKTISKAGQPREPQVCLLPPSRDELTKNQVSLSCAAKGFYPKDVLVRWLQGSQELPRENYKTTASVLDSDGSFFVVSKLTVAAEDWKKGDTFSCMVGHEALPLAFTQKSISRSP

SEQ ID NO: 156 - protein, 448 aa, Artificial Sequence
  Description of Artificial Sequence: Synthetic polypeptide
EVQLVESGGGLVQPGGSLRLSCAASGFNIKDTYIHWVRQAPGKGLEWVARIYPTNGYTRYADSVKGRFTISADTSKNTAYLQMNSLRAEDTAVYYCSRWGGDGFYAMDYWGQGTLVTVSSASTKGPSVFPLAPSSKSTSGGTAALGCLVKDYFPEPVTVSWNSGALTSGVHTFPAVLQSSGLYSLSSVVTVPSSSLGTQTYICNVNHKPSNTKVDKKVEPKSCDKTHTCPPCPAPELLGGPSVFLFRPALEDLLLGSEANVTCVVVDVSHEDPEVKFNWYVDGVEVHNAKTKPREEQYNSTYRVVSVLPGCAQPWNHGKEYKCKVSNKALPAPIEKTISKAGQPREPQVCLLPPSRDELTKNQVSLSCAAKGFYPKDVLVRWLQGSQELPRENYKTTASVLDSDGSFFVVSKLTVDKSRWQQGNVFSCMVGHEALPLAFTQKSISLSP

SEQ ID NO: 157 - protein, 448 aa, Artificial Sequence
  Description of Artificial Sequence: Synthetic polypeptide
EVQLVESGGGLVQPGGSLRLSCAASGFNIKDTYIHWVRQAPGKGLEWVARIYPTNGYTRYADSVKGRFTISADTSKNTAYLQMNSLRAEDTAVYYCSRWGGDGFYAMDYWGQGTLVTVSSASTKGPSVFPLAPSSKSTSGGTAALGCLVKDYFPEPVTVSWNSGALTSGVHTFPAVLQSSGLYSLSSVVTVPSSSLGTQTYICNVNHKPSNTKVDKKVEPKSCDKTHTCPPCPAPELLGGPSVFLFRPALEDLLLGSEANVTCVVVDVSHEDPEVKFNWYVDGVEVHNAKTKPREEQYNSTYRVVSVLTVLHQDWLNGKEYKCKVSNKALPAPIEKTISKAGQPREPQVCLLPPSRDELTKNQVSLSCAAKGFYPKDVLVRWLQGSQELPRENYKTTASVLDSDGSFFVVSKLTVAAEDWKKGDTFSCMVGHEALPLAFTQKSISRSP

SEQ ID NO: 158 - protein, 448 aa, Artificial Sequence
  Description of Artificial Sequence: Synthetic polypeptide
EVQLVESGGGLVQPGGSLRLSCAASGFNIKDTYIHWVRQAPGKGLEWVARIYPTNGYTRYADSVKGRFTISADTSKNTAYLQMNSLRAEDTAVYYCSRWGGDGFYAMDYWGQGTLVTVSSASTKGPSVFPLAPSSKSTSGGTAALGCLVKDYFPEPVTVSWNSGALTSGVHTFPAVLQSSGLYSLSSVVTVPSSSLGTQTYICNVNHKPSNTKVDKKVEPKSCDKTHTCPPCPAPELLGGPSVFLFRPALEDLLLGSEANVTCVVVDVSHEDPEVKFNWYVDGVEVHNAKTKPREEQYNSTYRVVSVLTVLHQDWLNGKEYKCKVSNKALPAPIEKTISKAGQPREPQVCLLPPSRDELTKNQVSLSCAAKGFYPKDVLVRWLQGSQELPRENYKTTASVLDSDGSFFVVSKLTVDKSRWQQGNVFSCMVGHEALPLAFTQKSISLSP

SEQ ID NO: 159 - protein, 447 aa, Artificial Sequence
  Description of Artificial Sequence: Synthetic polypeptide
EVQLVESGGGLVQPGGSLRLSCAASGFNIKDTYIHWVRQAPGKGLEWVARIYPTNGYTRYADSVKGRFTISADTSKNTAYLQMNSLRAEDTAVYYCSRWGGDGFYAMDYWGQGTLVTVSSASTKGPSVFPLAPSSKSTSGGTAALGCLVKDYFPEPVTVSWNSGALTSGVHTFPAVLQSSGLYSLSSVVTVPSSSLGTQTYICNVNHKPSNTKVDKKVEPKSCDKTHTCPPCPAPELLGGPSVFLFPPKPKDTLMISRTPEVTCVVVDVSHEDPEVKFNWYVDGVEVHNAKTKPREEQYNSTYRVVSVLTVLHQDWLNGKEYKCKVSNKALPAPIEKTISKAGQPREPQVYTLPPCRDELTKNQVSLWCLVKGFYPSDIAVEWESNGQPENNYKTTPPVLDSDGSFFLYSKLTVDKSRWQQGNVFSCSVMHEALHNHYTQKSLSLSP

SEQ ID NO: 160 - protein, 447 aa, Artificial Sequence
  Description of Artificial Sequence: Synthetic polypeptide
EVQLVESGGGLVQPGGSLRLSCAASGFNIKDTYIHWVRQAPGKGLEWVARIYPTNGYTRYADSVKGRFTISADTSKNTAYLQMNSLRAEDTAVYYCSRWGGDGFYAMDYWGQGTLVTVSSASTKGPSVFPLAPSSKSTSGGTAALGCLVKDYFPEPVTVSWNSGALTSGVHTFPAVLQSSGLYSLSSVVTVPSSSLGTQTYICNVNHKPSNTKVDKKVEPKSCDKTHTCPPCPAPELLGGPSVFLFPPKPKDTLMISRTPEVTCVVVDVSHEDPEVKFNWYVDGVEVHNAKTKPREEQYNSTYRVVSVLTVLHQDWLNGKEYKCKVSNKALPAPIEKTISKAGQPREPQVYTLPPCRDELTKNQVSLWCLVKGFYPSDIAVEWESNGQPENNYKTTPPVLDSDGSFFLYSKLTVDKSRWQQGNVFSCSVLHEALHSHYTQKSLSLSP

SEQ ID NO: 161 - protein, 447 aa, Artificial Sequence
  Description of Artificial Sequence: Synthetic polypeptide
EVQLVESGGGLVQPGGSLRLSCAASGFNIKDTYIHWVRQAPGKGLEWVARIYPTNGYTRYADSVKGRFTISADTSKNTAYLQMNSLRAEDTAVYYCSRWGGDGFYAMDYWGQGTLVTVSSASTKGPSVFPLAPSSKSTSGGTAALGCLVKDYFPEPVTVSWNSGALTSGVHTFPAVLQSSGLYSLSSVVTVPSSSLGTQTYICNVNHKPSNTKVDKKVEPKSCDKTHTCPPCPAPELLGGPDVFLFPPKPKDTLMISRTPEVTCVVVDVSHEDPEVKFNWYVDGVEVHNAKTKPREEQYNSTYRVVSVLTVLHQDWLNGKEYKCKVSNKALPAPEEKTISKAGQPREPQVYTLPPCRDELTKNQVSLWCLVKGFYPSDIAVEWESNGQPENNYKTTPPVLDSDGSFFLYSKLTVDKSRWQQGNVFSCSVMHEALHNHYTQKSLSLSP

SEQ ID NO: 162 - protein, 447 aa, Artificial Sequence
  Description of Artificial Sequence: Synthetic polypeptide
EVQLVESGGGLVQPGGSLRLSCAASGFNIKDTYIHWVRQAPGKGLEWVARIYPTNGYTRYADSVKGRFTISADTSKNTAYLQMNSLRAEDTAVYYCSRWGGDGFYAMDYWGQGTLVTVSSASTKGPSVFPLAPSSKSTSGGTAALGCLVKDYFPEPVTVSWNSGALTSGVHTFPAVLQSSGLYSLSSVVTVPSSSLGTQTYICNVNHKPSNTKVDKKVEPKSCDKTHTCPPCPAPELLGGPDVFLFPPKPKDTLMISRTPEVTCVVVDVSHEDPEVKFNWYVDGVEVHNAKTKPREEQYNSTYRVVSVLTVLHQDWLNGKEYKCKVSNKALPAPEEKTISKAGQPREPQVYTLPPCRDELTKNQVSLWCLVKGFYPSDIAVEWESNGQPENNYKTTPPVLDSDGSFFLYSKLTVDKSRWQQGNVFSCSVLHEALHSHYTQKSLSLSP

SEQ ID NO: 163 - protein, 443 aa, Artificial Sequence
  Description of Artificial Sequence: Synthetic polypeptide
EVQLVESGGGLVQPGGSLRLSCAASGFNIKDTYIHWVRQAPGKGLEWVARIYPTNGYTRYADSVKGRFTISADTSKNTAYLQMNSLRAEDTAVYYCSRWGGDGFYAMDYWGQGTLVTVSSASTKGPSVFPLAPSSKSTSGGTAALGCLVKDYFPEPVTVSWNSGALTSGVHTFPAVLQSSGLYSLSSVVTVPSSSLGTQTYICNVNHKPSNTKVDKKVEPKSCDKTHTCPPCPCCHPRVFLFPPKPKDTLYITREPEVTCVVTGLRDEDPEVKFNWYVDGVEVHNAKTKPREEQYCGCYSVVSVLTVLHQDWLNGKEYKCKVSNKALPAPIEKTISKAGQPREPQVYTLPPCRDELTKNQVSLWCLVKGFYPSDIAVEWESNGQPENNYKTTPPVLDSDGSFFLYSKLTVDKSRWQQGNVFSCSVMHEALHNHYTQKSLSLSP

SEQ ID NO: 164 - protein, 448 aa, Artificial Sequence
  Description of Artificial Sequence: Synthetic polypeptide
EVQLVESGGGLVQPGGSLRLSCAASGFNIKDTYIHWVRQAPGKGLEWVARIYPTNGYTRYADSVKGRFTISADTSKNTAYLQMNSLRAEDTAVYYCSRWGGDGFYAMDYWGQGTLVTVSSASTKGPSVFPLAPSSKSTSGGTAALGCLVKDYFPEPVTVSWNSGALTSGVHTFPAVLQSSGLYSLSSVVTVPSSSLGTQTYICNVNHKPSNTKVDKKVEPKSCDKTHTCPPCPAPELLCCHPDVFLFPPKPKDTLMISRTPEVTCVVTGLRDEDPEVKFNWYVDGVEVHNAKTKPREEQYCGCYSVVSVLTVLHQDWLNGKEYKCKVSNKALPAPEEKTISKAGQPREPQVYTLPPCRDELTKNQVSLWCLVKGFYPSDIAVEWESNGQPENNYKTTPPVLDSDGSFFLYSKLTVDKSRWQQGNVFSCSVMHEALHNHYTQKSLSLSP

SEQ ID NO: 165 - protein, 449 aa, Artificial Sequence
  Description of Artificial Sequence: Synthetic polypeptide
EVQLVESGGGLVQPGGSLRLSCAASGFNIKDTYIHWVRQAPGKGLEWVARIYPTNGYTRYADSVKGRFTISADTSKNTAYLQMNSLRAEDTAVYYCSRWGGDGFYAMDYWGQGTLVTVSSASTKGPSVFPLAPSSKSTSGGTAALGCLVKDYFPEPVTVSWNSGALTSGVHTFPAVLQSSGLYSLSSVVTVPSSSLGTQTYICNVNHKPSNTKVDKKVEPKSCDKTHTCPPCPAPELLCCHPRVFLFPPALEDLLLGSEANVTCVVTGLRDEDPEVKFNWYVDGVEVHNAKTKPREEQYCGCYSVVSVLTVLHQDWLNGKEYKCKVSNKALPAPIEKTISKAGQPREPQVYLLPPSRDELTKNQVSLTCLAKGFYPKDVLVRWLQGSQELPRENYKTTASVLDSDGSFFVYSKLTVAAEDWKKGDTFSCMVGHEALPLAFTQKSISRSP

SEQ ID NO: 166 - protein, 449 aa, Artificial Sequence
  Description of Artificial Sequence: Synthetic polypeptide
EVQLVESGGGLVQPGGSLRLSCAASGFNIKDTYIHWVRQAPGKGLEWVARIYPTNGYTRYADSVKGRFTISADTSKNTAYLQMNSLRAEDTAVYYCSRWGGDGFYAMDYWGQGTLVTVSSASTKGPSVFPLAPSSKSTSGGTAALGCLVKDYFPEPVTVSWNSGALTSGVHTFPAVLQSSGLYSLSSVVTVPSSSLGTQTYICNVNHKPSNTKVDKKVEPKSCDKTHTCPPCPAPELLCCHPRVFLFPPALEDLLLGSEANVTCVVTGLRDEDPEVKFNWYVDGVEVHNAKTKPREEQYNSTYRVVSVLTVLHQDWLNGKEYKCKVSNKALPAPIEKTISKAGQPREPQVYLLPPSRDELTKNQVSLTCLAKGFYPKDVLVRWLQGSQELPRENYKTTASVLDSDGSFFVYSKLTVAAEDWKKGDTFSCMVGHEALPLAFTQKSISRSP

SEQ ID NO: 167 - protein, 449 aa, Artificial Sequence
  Description of Artificial Sequence: Synthetic polypeptide
EVQLVESGGGLVQPGGSLRLSCAASGFNIKDTYIHWVRQAPGKGLEWVARIYPTNGYTRYADSVKGRFTISADTSKNTAYLQMNSLRAEDTAVYYCSRWGGDGFYAMDYWGQGTLVTVSSASTKGPSVFPLAPSSKSTSGGTAALGCLVKDYFPEPVTVSWNSGALTSGVHTFPAVLQSSGLYSLSSVVTVPSSSLGTQTYICNVNHKPSNTKVDKKVEPKSCDKTHTCPPCPAPELLCCHPRVFLFPPALEDLLLGSEANVTCVVVDVSHEDPEVKFNWYVDGVEVHNAKTKPREEQYNSTYRVVSVLTVLHQDWLNGKEYKCKVSNKALPAPIEKTISKAGQPREPQVYLLPPSRDELTKNQVSLTCLAKGFYPKDVLVRWLQGSQELPRENYKTTASVLDSDGSFFVYSKLTVAAEDWKKGDTFSCMVGHEALPLAFTQKSISRSP

SEQ ID NO: 168 - protein, 448 aa, Artificial Sequence
  Description of Artificial Sequence: Synthetic polypeptide
EVQLVESGGGLVQPGGSLRLSCAASGFNIKDTYIHWVRQAPGKGLEWVARIYPTNGYTRYADSVKGRFTISADTSKNTAYLQMNSLRAEDTAVYYCSRWGGDGFYAMDYWGQGTLVTVSSASTKGPSVFPLAPSSKSTSGGTAALGCLVKDYFPEPVTVSWNSGALTSGVHTFPAVLQSSGLYSLSSVVTVPSSSLGTQTYICNVNHKPSNTKVDKKVEPKSCDKTHTCPPCPAPELLGGPSVFLFPPALEDLLLGSEANVTCVVVDVSHEDPEVKFNWYVDGVEVHNAKTKPREEQYNSTYRVVSVLTVLHQDWLNGKEYKCKVSNKALPAPIEKTISKAGQPREPQVYLLPPSRDELTKNQVSLTCLAKGFYPKDVLVRWLQGSQELPRENYKTTASVLDSDGSFFVYSKLTVAAEDWKKGDTFSCMVGHEALPLAFTQKSISRSP

SEQ ID NO: 169 - protein, 448 aa, Artificial Sequence
  Description of Artificial Sequence: Synthetic polypeptide
EVQLVESGGGLVQPGGSLRLSCAASGFNIKDTYIHWVRQAPGKGLEWVARIYPTNGYTRYADSVKGRFTISADTSKNTAYLQMNSLRAEDTAVYYCSRWGGDGFYAMDYWGQGTLVTVSSASTKGPSVFPLAPSSKSTSGGTAALGCLVKDYFPEPVTVSWNSGALTSGVHTFPAVLQSSGLYSLSSVVTVPSSSLGTQTYICNVNHKPSNTKVDKKVEPKSCDKTHTCPPCPAPELLGGPSVFLFPPALEDLLLGSEANVTCVVTGLRDEDPEVKFNWYVDGVEVHNAKTKPREEQYNSTYRVVSVLTVLHQDWLNGKEYKCKVSNKALPAPIEKTISKAGQPREPQVYLLPPSRDELTKNQVSLTCLAKGFYPKDVLVRWLQGSQELPRENYKTTASVLDSDGSFFVYSKLTVAAEDWKKGDTFSCMVGHEALPLAFTQKSISRSP

SEQ ID NO: 170 - protein, 448 aa, Artificial Sequence
  Description of Artificial Sequence: Synthetic polypeptide
EVQLVESGGGLVQPGGSLRLSCAASGFNIKDTYIHWVRQAPGKGLEWVARIYPTNGYTRYADSVKGRFTISADTSKNTAYLQMNSLRAEDTAVYYCSRWGGDGFYAMDYWGQGTLVTVSSASTKGPSVFPLAPSSKSTSGGTAALGCLVKDYFPEPVTVSWNSGALTSGVHTFPAVLQSSGLYSLSSVVTVPSSSLGTQTYICNVNHKPSNTKVDKKVEPKSCDKTHTCPPCPAPELLGGPSVFLFPPALEDLLLGSEANVTCVVTGLRDEDPEVKFNWYVDGVEVHNAKTKPREEQYCGCYSVVSVLTVLHQDWLNGKEYKCKVSNKALPAPIEKTISKAGQPREPQVYLLPPSRDELTKNQVSLTCLAKGFYPKDVLVRWLQGSQELPRENYKTTASVLDSDGSFFVYSKLTVAAEDWKKGDTFSCMVGHEALPLAFTQKSISRSP

SEQ ID NO: 171 - protein, 448 aa, Artificial Sequence
  Description of Artificial Sequence: Synthetic polypeptide
EVQLVESGGGLVQPGGSLRLSCAASGFNIKDTYIHWVRQAPGKGLEWVARIYPTNGYTRYADSVKGRFTISADTSKNTAYLQMNSLRAEDTAVYYCSRWGGDGFYAMDYWGQGTLVTVSSASTKGPSVFPLAPSSKSTSGGTAALGCLVKDYFPEPVTVSWNSGALTSGVHTFPAVLQSSGLYSLSSVVTVPSSSLGTQTYICNVNHKPSNTKVDKKVEPKSCDKTHTCPPCPAPELLGGPSVFLFPPALEDLLLGSEANVTCVVVDVSHEDPEVKFNWYVDGVEVHNAKTKPREEQYCGCYSVVSVLTVLHQDWLNGKEYKCKVSNKALPAPIEKTISKAGQPREPQVYLLPPSRDELTKNQVSLTCLAKGFYPKDVLVRWLQGSQELPRENYKTTASVLDSDGSFFVYSKLTVAAEDWKKGDTFSCMVGHEALPLAFTQKSISRSP

SEQ ID NO: 172 - protein, 444 aa, Artificial Sequence
  Description of Artificial Sequence: Synthetic polypeptide
EVQLVESGGGLVQPGGSLRLSCAASGFNIKDTYIHWVRQAPGKGLEWVARIYPTNGYTRYADSVKGRFTISADTSKNTAYLQMNSLRAEDTAVYYCSRWGGDGFYAMDYWGQGTLVTVSSASTKGPSVFPLAPSSKSTSGGTAALGCLVKDYFPEPVTVSWNSGALTSGVHTFPAVLQSSGLYSLSSVVTVPSSSLGTQTYICNVNHKPSNTKVDKKVEPKSCDKTHTCPPCPLGGPSVFLFPPALEDLLLGSEANVTCVVVDVSHEDPEVKFNWYVDGVEVHNAKTKPREEQYCGCYSVVSVLTVLHQDWLNGKEYKCKVSNKALPAPIEKTISKAGQPREPQVYLLPPSRDELTKNQVSLTCLAKGFYPKDVLVRWLQGSQELPRENYKTTASVLDSDGSFFVYSKLTVAAEDWKKGDTFSCMVGHEALPLAFTQKSISRSP

SEQ ID NO: 173 - protein, 444 aa, Artificial Sequence
  Description of Artificial Sequence: Synthetic polypeptide
EVQLVESGGGLVQPGGSLRLSCAASGFNIKDTYIHWVRQAPGKGLEWVARIYPTNGYTRYADSVKGRFTISADTSKNTAYLQMNSLRAEDTAVYYCSRWGGDGFYAMDYWGQGTLVTVSSASTKGPSVFPLAPSSKSTSGGTAALGCLVKDYFPEPVTVSWNSGALTSGVHTFPAVLQSSGLYSLSSVVTVPSSSLGTQTYICNVNHKPSNTKVDKKVEPKSCDKTHTCPPCPLGGPSVFLFPPALEDLLLGSEANVTCVVVDVSHEDPEVKFNWYVDGVEVHNAKTKPREEQYNSTYRVVSVLTVLHQDWLNGKEYKCKVSNKALPAPIEKTISKAGQPREPQVYLLPPSRDELTKNQVSLTCLAKGFYPKDVLVRWLQGSQELPRENYKTTASVLDSDGSFFVYSKLTVAAEDWKKGDTFSCMVGHEALPLAFTQKSISRSP

SEQ ID NO: 174 - protein, 444 aa, Artificial Sequence
  Description of Artificial Sequence: Synthetic polypeptide
EVQLVESGGGLVQPGGSLRLSCAASGFNIKDTYIHWVRQAPGKGLEWVARIYPTNGYTRYADSVKGRFTISADTSKNTAYLQMNSLRAEDTAVYYCSRWGGDGFYAMDYWGQGTLVTVSSASTKGPSVFPLAPSSKSTSGGTAALGCLVKDYFPEPVTVSWNSGALTSGVHTFPAVLQSSGLYSLSSVVTVPSSSLGTQTYICNVNHKPSNTKVDKKVEPKSCDKTHTCPPCPCCHPRVFLFRPALEDLLLGSEANVTCVVTGLRDEDPEVKFNWYVDGVEVHNAKTKPREEQYCGCYSVVSVLTVLHQDWLNGKEYKCKVSNKALPAPIEKTISKAGQPRRPEVYLLPPSRDELTKNQVSLTCLAKGFYPKDVLVRWLQGSQELPRENYKTTASVLDSDGSFFVYSKLTVAAEDWKKGDTFSCMVGHEALPLAFTQKSISRSP

SEQ ID NO: 175 - protein, 444 aa, Artificial Sequence
  Description of Artificial Sequence: Synthetic polypeptide
EVQLVESGGGLVQPGGSLRLSCAASGFNIKDTYIHWVRQAPGKGLEWVARIYPTNGYTRYADSVKGRFTISADTSKNTAYLQMNSLRAEDTAVYYCSRWGGDGFYAMDYWGQGTLVTVSSASTKGPSVFPLAPSSKSTSGGTAALGCLVKDYFPEPVTVSWNSGALTSGVHTFPAVLQSSGLYSLSSVVTVPSSSLGTQTYICNVNHKPSNTKVDKKVEPKSCDKTHTCPPCPCCHPRVFLFPPALEDLLLGSEANVTCVVTGLRDEDPEVKFNWYVDGVEVHNAKTKPREEQYCGCYSVVSVLTVLHQDWLNGKEYKCKVSNKALPAPIEKTISKAGQPRRPEVYLLPPSRDELTKNQVSLTCLAKGFYPKDVLVRWLQGSQELPRENYKTTASVLDSDGSFFVYSKLTVAAEDWKKGDTFSCMVGHEALPLAFTQKSISRSP

SEQ ID NO: 176 - protein, 443 aa, Artificial Sequence
  Description of Artificial Sequence: Synthetic polypeptide
EVQLVESGGGLVQPGGSLRLSCAASGFNIKDTYIHWVRQAPGKGLEWVARIYPTNGYTRYADSVKGRFTISADTSKNTAYLQMNSLRAEDTAVYYCSRWGGDGFYAMDYWGQGTLVTVSSASTKGPSVFPLAPSSKSTSGGTAALGCLVKDYFPEPVTVSWNSGALTSGVHTFPAVLQSSGLYSLSSVVTVPSSSLGTQTYICNVNHKPSNTKVDKKVEPKSCDKTHTCPPCPCCHPRVFLFRPALEDLLLGSEANVTCVVTGLRDASGATFNWYVDGVEVHNAKQGPPERDLCGCYSVVSVLPGCAQPWNHGKEYKCKAAHPELKTPIEKTISKAGQPREPQVYLLPPSRDELTKNQVSLTCLAKGFYPKDVLVRWLQGSQELPRENYKTTASVLDSDGSFFVYSKLTVAAEDWKKGDTFSCMVGHEALPLAFTQKSISRSP

SEQ ID NO: 177 - protein, 443 aa, Artificial Sequence
  Description of Artificial Sequence: Synthetic polypeptide
EVQLVESGGGLVQPGGSLRLSCAASGFNIKDTYIHWVRQAPGKGLEWVARIYPTNGYTRYADSVKGRFTISADTSKNTAYLQMNSLRAEDTAVYYCSRWGGDGFYAMDYWGQGTLVTVSSASTKGPSVFPLAPSSKSTSGGTAALGCLVKDYFPEPVTVSWNSGALTSGVHTFPAVLQSSGLYSLSSVVTVPSSSLGTQTYICNVNHKPSNTKVDKKVEPKSCDKTHTCPPCPCCHPRVFLFRPALEDLLLGSEANVTCVVTGLRDASGATFNWYVDGVEVHNAKQGPPERDLCGCYSVVSVLTVLHQDWLNGKEYKCKAAHPELKTPIEKTISKAGQPREPQVYLLPPSRDELTKNQVSLTCLAKGFYPKDVLVRWLQGSQELPRENYKTTASVLDSDGSFFVYSKLTVAAEDWKKGDTFSCMVGHEALPLAFTQKSISRSP

SEQ ID NO: 178 - protein, 448 aa, Artificial Sequence
  Description of Artificial Sequence: Synthetic polypeptide
EVQLVESGGGLVQPGGSLRLSCAASGFNIKDTYIHWVRQAPGKGLEWVARIYPTNGYTRYADSVKGRFTISADTSKNTAYLQMNSLRAEDTAVYYCSRWGGDGFYAMDYWGQGTLVTVSSASTKGPSVFPLAPSSKSTSGGTAALGCLVKDYFPEPVTVSWNSGALTSGVHTFPAVLQSSGLYSLSSVVTVPSSSLGTQTYICNVNHKPSNTKVDKKVEPKSCDKTHTCPPCPAPELLCCHPRVFLFRPALEDLLLGSEANVTCVVTGLRDASGATFNWYVDGVEVHNAKQGPPERDLCGCYSVVSVLPGCAQPWNHGKEYKCKAAHPELKTPIEKTISKAGQPREPQVYLLPPSRDELTKNQVSLTCLAKGFYPKDVLVRWLQGSQELPRENYKTTASVLDSDGSFFVYSKLTVAAEDWKKGDTFSCMVGHEALPLAFTQKSISRSP

SEQ ID NO: 179 - protein, 448 aa, Artificial Sequence
  Description of Artificial Sequence: Synthetic polypeptide
EVQLVESGGGLVQPGGSLRLSCAASGFNIKDTYIHWVRQAPGKGLEWVARIYPTNGYTRYADSVKGRFTISADTSKNTAYLQMNSLRAEDTAVYYCSRWGGDGFYAMDYWGQGTLVTVSSASTKGPSVFPLAPSSKSTSGGTAALGCLVKDYFPEPVTVSWNSGALTSGVHTFPAVLQSSGLYSLSSVVTVPSSSLGTQTYICNVNHKPSNTKVDKKVEPKSCDKTHTCPPCPAPELLCCHPRVFLFRPALEDLLLGSEANVTCVVTGLRDASGATFNWYVDGVEVHNAKQGPPERDLCGCYSVVSVLTVLHQDWLNGKEYKCKAAHPELKTPIEKTISKAGQPREPQVYLLPPSRDELTKNQVSLTCLAKGFYPKDVLVRWLQGSQELPRENYKTTASVLDSDGSFFVYSKLTVAAEDWKKGDTFSCMVGHEALPLAFTQKSISRSP

SEQ ID NO: 180 - protein, 447 aa, Artificial Sequence
  Description of Artificial Sequence: Synthetic polypeptide
EVQLVESGGGLVQPGGSLRLSCAASGFNIKDTYIHWVRQAPGKGLEWVARIYPTNGYTRYADSVKGRFTISADTSKNTAYLQMNSLRAEDTAVYYCSRWGGDGFYAMDYWGQGTLVTVSSASTKGPSVFPLAPSSKSTSGGTAALGCLVKDYFPEPVTVSWNSGALTSGVHTFPAVLQSSGLYSLSSVVTVPSSSLGTQTYICNVNHKPSNTKVDKKVEPKSCDKTHTCPPCPAPELLGGPSVFLFRPALEDLLLGSEANVTCVVTGLRDASGATFNWYVDGVEVHNAKQGPPERDLCGCYSVVSVLPGCAQPWNHGKEYKCKAAHPELKTPIEKTISKAGQPREPQVYLLPPSRDELTKNQVSLTCLAKGFYPKDVLVRWLQGSQELPRENYKTTASVLDSDGSFFVYSKLTVAAEDWKKGDTFSCMVGHEALPLAFTQKSISRSP

SEQ ID NO: 181 - protein, 447 aa, Artificial Sequence
  Description of Artificial Sequence: Synthetic polypeptide
EVQLVESGGGLVQPGGSLRLSCAASGFNIKDTYIHWVRQAPGKGLEWVARIYPTNGYTRYADSVKGRFTISADTSKNTAYLQMNSLRAEDTAVYYCSRWGGDGFYAMDYWGQGTLVTVSSASTKGPSVFPLAPSSKSTSGGTAALGCLVKDYFPEPVTVSWNSGALTSGVHTFPAVLQSSGLYSLSSVVTVPSSSLGTQTYICNVNHKPSNTKVDKKVEPKSCDKTHTCPPCPAPELLGGPSVFLFRPALEDLLLGSEANVTCVVTGLRDASGATFNWYVDGVEVHNAKQGPPERDLCGCYSVVSVLTVLHQDWLNGKEYKCKAAHPELKTPIEKTISKAGQPREPQVYLLPPSRDELTKNQVSLTCLAKGFYPKDVLVRWLQGSQELPRENYKTTASVLDSDGSFFVYSKLTVAAEDWKKGDTFSCMVGHEALPLAFTQKSISRSP

SEQ ID NO: 182 - protein, 440 aa, Artificial Sequence
  Description of Artificial Sequence: Synthetic polypeptide
EVQLVESGGGLVQPGGSLRLSCAASGFNIKDTYIHWVRQAPGKGLEWVARIYPTNGYTRYADSVKGRFTISADTSKNTAYLQMNSLRAEDTAVYYCSRWGGDGFYAMDYWGQGTLVTVSSASPTSPKVFPLSLDSTPQDGNVVVACLVQGFFPQEPLSVTWSESGQNVTARNFPPSQDASGDLYTTSSQLTLPATQCPDGKSVTCHVKHYTNPSQDVTVPCRVPPPPPCCHPRLSLHRPALEDLLLGSEANLTCTLTGLRDASGATFTWTPSSGKSAVQGPPERDLCGCYSVSSVLPGCAEPWNHGETFTCTAAHPELKTPLTANITKSGNTFRPEVHLLPPPSEELALNELVTLTCLARGFSPKDVLVRWLQGSQELPREKYLTWASRQEPSQGTTTFAVTSILRVAAEDWKKGDTFSCMVGHEALPLAFTQKTIDRLA

SEQ ID NO: 183 - protein, 440 aa, Artificial Sequence
  Description of Artificial Sequence: Synthetic polypeptide
EVQLVESGGGLVQPGGSLRLSCAASGFNIKDTYIHWVRQAPGKGLEWVARIYPTNGYTRYADSVKGRFTISADTSKNTAYLQMNSLRAEDTAVYYCSRWGGDGFYAMDYWGQGTLVTVSSASPTSPKVFPLSLDSTPQDGNVVVACLVQGFFPQEPLSVTWSESGQNVTARNFPPSQDASGDLYTTSSQLTLPATQCPDGKSVTCHVKHYTNPSQDVTVPCRVPPPPPCCHPRLSLHRPALEDLLLGSEANLTCTLTGLRDASGATFTWTPSSGKSAVQGPPERDLCGCYSVSSVLPGCAQPWYHGETFTCTAAHPELKTPLTANITKSGNTFRPEVHLLPPPSEELALNELVTLTCLARGFSPKDVLVRWLQGSQELPREKYLTWASRQEPSQGTTTFAVTSILRVAAEDWKKGDTFSCMVGHEALPLAFTQKTIDRLA

SEQ ID NO: 184 - protein, 440 aa, Artificial Sequence
  Description of Artificial Sequence: Synthetic polypeptide
EVQLVESGGGLVQPGGSLRLSCAASGFNIKDTYIHWVRQAPGKGLEWVARIYPTNGYTRYADSVKGRFTISADTSKNTAYLQMNSLRAEDTAVYYCSRWGGDGFYAMDYWGQGTLVTVSSASPTSPKVFPLSLDSTPQDGNVVVACLVQGFFPQEPLSVTWSESGQNVTARNFPPSQDASGDLYTTSSQLTLPATQCPDGKSVTCHVKHYTNPSQDVTVPCRVPPPPPCCHPRLSLHRPALEDLLLGSEANLTCTLTGLRDASGATFTWTPSSGKSAVQGPPERDLCGCYSVSSVLPGCAQPWNHGETFTCTAAHPELKTPLTANITKSGNTFRPEVHLLPPPSEELALNELVTLTCLARGFSPKDVLVRWLQGDQELPREKYLTWASRQEPSQGTTTFAVTSILRVAAEDWKKGDTFSCMVGHEALPLAFTQKTIDRLA

SEQ ID NO: 185 - protein, 440 aa, Artificial Sequence
  Description of Artificial Sequence: Synthetic polypeptide
EVQLVESGGGLVQPGGSLRLSCAASGFNIKDTYIHWVRQAPGKGLEWVARIYPTNGYTRYADSVKGRFTISADTSKNTAYLQMNSLRAEDTAVYYCSRWGGDGFYAMDYWGQGTLVTVSSASPTSPKVFPLSLDSTPQDGNVVVACLVQGFFPQEPLSVTWSESGQNVTARNFPPSQDASGDLYTTSSQLTLPATQCPDGKSVTCHVKHYTNPSQDVTVPCRVPPPPPCCHPRLSLHRPALEDLLLGSEANLTCTLTGLRDASGATFTWTPSSGKSAVQGPPERDLCGCYSVSSVLPGCAQPWNHGETFTCTAAHPELKTPLTANITKSGNTFRPEVHLLPPPSEELALNELVTLTCLARGFSPKDVLVRWLQGSQELPREKYLTWASRQEPSQGTTTFAVTSILRVAAEDWKKGDTFSCYVGHEALPLAFTQKTIDRLA

SEQ ID NO: 186 - protein, 440 aa, Artificial Sequence
  Description of Artificial Sequence: Synthetic polypeptide
EVQLVESGGGLVQPGGSLRLSCAASGFNIKDTYIHWVRQAPGKGLEWVARIYPTNGYTRYADSVKGRFTISADTSKNTAYLQMNSLRAEDTAVYYCSRWGGDGFYAMDYWGQGTLVTVSSASPTSPKVFPLSLDSTPQDGNVVVACLVQGFFPQEPLSVTWSESGQNVTARNFPPSQDASGDLYTTSSQLTLPATQCPDGKSVTCHVKHYTNPSQDVTVPCRVPPPPPCCHPRLSLHRPALEDLLLGSEANLTCTLTGLRDASGATFTWTPSSGKSAVQGPPERDLCGCYSVSSVLPGCAQPWNHGETFTCTAAHPELKTPLTANITKSGNTFRPEVHLLPPPSEELALNELVTLTCLARGFSPKDVLVRWLQGSQELPREKYLTWASRQEPSQGTTTFAVTSILRVAAEDWKKGDTFSCMVGHEALPLAFTYKTIDRLA

SEQ ID NO: 187 - protein, 440 aa, Artificial Sequence
  Description of Artificial Sequence: Synthetic polypeptide
EVQLVESGGGLVQPGGSLRLSCAASGFNIKDTYIHWVRQAPGKGLEWVARIYPTNGYTRYADSVKGRFTISADTSKNTAYLQMNSLRAEDTAVYYCSRWGGDGFYAMDYWGQGTLVTVSSASPTSPKVFPLSLDSTPQDGNVVVACLVQGFFPQEPLSVTWSESGQNVTARNFPPSQDASGDLYTTSSQLTLPATQCPDGKSVTCHVKHYTNPSQDVTVPCRVPPPPPCCHPRLSLHRPALEDLLLGSEANLTCTLTGLRDASGATFTWTPSSGKSAVQGPPERDLCGCYSVSSVLPGCAEPWYHGETFTCTAAHPELKTPLTANITKSGNTFRPEVHLLPPPSEELALNELVTLTCLARGFSPKDVLVRWLQGSQELPREKYLTWASRQEPSQGTTTFAVTSILRVAAEDWKKGDTFSCMVGHEALPLAFTQKTIDRLA

SEQ ID NO: 188 - protein, 444 aa, Artificial Sequence
  Description of Artificial Sequence: Synthetic polypeptide
EVQLVESGGGLVQPGGSLRLSCAASGFNIKDTYIHWVRQAPGKGLEWVARIYPTNGYTRYADSVKGRFTISADTSKNTAYLQMNSLRAEDTAVYYCSRWGGDGFYAMDYWGQGTLVTVSSASTKGPSVFPLAPSSKSTSGGTAALGCLVKDYFPEPVTVSWNSGALTSGVHTFPAVLQSSGLYSLSSVVTVPSSSLGTQTYICNVNHKPSNTKVDKKVEPKSCDKTHTCPPCPCCHPRVFLFRPALEDLLLGSEANVTCVVTGLRDEDPEVKFNWYVDGVEVHNAKTKPREEQYCGCYSVVSVLTVLHEDWLNGKEYKCKVSNKALPAPIEKTISKAGQPREPQVYLLPPSRDELTKNQVSLTCLAKGFYPKDVLVRWLQGSQELPRENYKTTASVLDSDGSFFVYSKLTVAAEDWKKGDTFSCMVGHEALPLAFTQKSISRSP

SEQ ID NO: 189 - protein, 444 aa, Artificial Sequence
  Description of Artificial Sequence: Synthetic polypeptide
EVQLVESGGGLVQPGGSLRLSCAASGFNIKDTYIHWVRQAPGKGLEWVARIYPTNGYTRYADSVKGRFTISADTSKNTAYLQMNSLRAEDTAVYYCSRWGGDGFYAMDYWGQGTLVTVSSASTKGPSVFPLAPSSKSTSGGTAALGCLVKDYFPEPVTVSWNSGALTSGVHTFPAVLQSSGLYSLSSVVTVPSSSLGTQTYICNVNHKPSNTKVDKKVEPKSCDKTHTCPPCPCCHPRVFLFRPALEDLLLGSEANVTCVVTGLRDEDPEVKFNWYVDGVEVHNAKTKPREEQYCGCYSVVSVLTVLHQDWYNGKEYKCKVSNKALPAPIEKTISKAGQPREPQVYLLPPSRDELTKNQVSLTCLAKGFYPKDVLVRWLQGSQELPRENYKTTASVLDSDGSFFVYSKLTVAAEDWKKGDTFSCMVGHEALPLAFTQKSISRSP

SEQ ID NO: 190 - protein, 444 aa, Artificial Sequence
  Description of Artificial Sequence: Synthetic polypeptide
EVQLVESGGGLVQPGGSLRLSCAASGFNIKDTYIHWVRQAPGKGLEWVARIYPTNGYTRYADSVKGRFTISADTSKNTAYLQMNSLRAEDTAVYYCSRWGGDGFYAMDYWGQGTLVTVSSASTKGPSVFPLAPSSKSTSGGTAALGCLVKDYFPEPVTVSWNSGALTSGVHTFPAVLQSSGLYSLSSVVTVPSSSLGTQTYICNVNHKPSNTKVDKKVEPKSCDKTHTCPPCPCCHPRVFLFRPALEDLLLGSEANVTCVVTGLRDEDPEVKFNWYVDGVEVHNAKTKPREEQYCGCYSVVSVLTVLHQDWLNGKEYKCKVSNKALPAPIEKTISKAGQPREPQVYLLPPSRDELTKNQVSLTCLAKGFYPKDVLVRWLQGDQELPRENYKTTASVLDSDGSFFVYSKLTVAAEDWKKGDTFSCMVGHEALPLAFTQKSISRSP

SEQ ID NO: 191 - protein, 444 aa, Artificial Sequence
  Description of Artificial Sequence: Synthetic polypeptide
EVQLVESGGGLVQPGGSLRLSCAASGFNIKDTYIHWVRQAPGKGLEWVARIYPTNGYTRYADSVKGRFTISADTSKNTAYLQMNSLRAEDTAVYYCSRWGGDGFYAMDYWGQGTLVTVSSASTKGPSVFPLAPSSKSTSGGTAALGCLVKDYFPEPVTVSWNSGALTSGVHTFPAVLQSSGLYSLSSVVTVPSSSLGTQTYICNVNHKPSNTKVDKKVEPKSCDKTHTCPPCPCCHPRVFLFRPALEDLLLGSEANVTCVVTGLRDEDPEVKFNWYVDGVEVHNAKTKPREEQYCGCYSVVSVLTVLHQDWLNGKEYKCKVSNKALPAPIEKTISKAGQPREPQVYLLPPSRDELTKNQVSLTCLAKGFYPKDVLVRWLQGSQELPRENYKTTASVLDSDGSFFVYSKLTVAAEDWKKGDTFSCYVGHEALPLAFTQKSISRSP

SEQ ID NO: 192 - protein, 444 aa, Artificial Sequence
  Description of Artificial Sequence: Synthetic polypeptide
EVQLVESGGGLVQPGGSLRLSCAASGFNIKDTYIHWVRQAPGKGLEWVARIYPTNGYTRYADSVKGRFTISADTSKNTAYLQMNSLRAEDTAVYYCSRWGGDGFYAMDYWGQGTLVTVSSASTKGPSVFPLAPSSKSTSGGTAALGCLVKDYFPEPVTVSWNSGALTSGVHTFPAVLQSSGLYSLSSVVTVPSSSLGTQTYICNVNHKPSNTKVDKKVEPKSCDKTHTCPPCPCCHPRVFLFRPALEDLLLGSEANVTCVVTGLRDEDPEVKFNWYVDGVEVHNAKTKPREEQYCGCYSVVSVLTVLHQDWLNGKEYKCKVSNKALPAPIEKTISKAGQPREPQVYLLPPSRDELTKNQVSLTCLAKGFYPKDVLVRWLQGSQELPRENYKTTASVLDSDGSFFVYSKLTVAAEDWKKGDTFSCMVGHEALPLAFTYKSISRSP

SEQ ID NO: 193 - protein, 444 aa, Artificial Sequence
  Description of Artificial Sequence: Synthetic polypeptide
EVQLVESGGGLVQPGGSLRLSCAASGFNIKDTYIHWVRQAPGKGLEWVARIYPTNGYTRYADSVKGRFTISADTSKNTAYLQMNSLRAEDTAVYYCSRWGGDGFYAMDYWGQGTLVTVSSASTKGPSVFPLAPSSKSTSGGTAALGCLVKDYFPEPVTVSWNSGALTSGVHTFPAVLQSSGLYSLSSVVTVPSSSLGTQTYICNVNHKPSNTKVDKKVEPKSCDKTHTCPPCPCCHPRVFLFRPALEDLLLGSEANVTCVVTGLRDEDPEVKFNWYVDGVEVHNAKTKPREEQYCGCYSVVSVLTVLHEDWYNGKEYKCKVSNKALPAPIEKTISKAGQPREPQVYLLPPSRDELTKNQVSLTCLAKGFYPKDVLVRWLQGSQELPRENYKTTASVLDSDGSFFVYSKLTVAAEDWKKGDTFSCMVGHEALPLAFTQKSISRSP

SEQ ID NO: 194 - protein, 448 aa, Artificial Sequence
  Description of Artificial Sequence: Synthetic polypeptide
EVQLVESGGGLVQPGGSLRLSCAASGFNIKDTYIHWVRQAPGKGLEWVARIYPTNGYTRYADSVKGRFTISADTSKNTAYLQMNSLRAEDTAVYYCSRWGGDGFYAMDYWGQGTLVTVSSASTKGPSVFPLAPSSKSTSGGTAALGCLVKDYFPEPVTVSWNSGALTSGVHTFPAVLQSSGLYSLSSVVTVPSSSLGTQTYICNVNHKPSNTKVDKKVEPKSCDKTHTCPPCPAPELLGGPSVFLFRPALEDLLLGSEANVTCVVVDVSHEDPEVKFNWYVDGVEVHNAKTKPREEQYNSTYRVVSVLTVLHEDWLNGKEYKCKVSNKALPAPIEKTISKAGQPREPQVYLLPPSRDELTKNQVSLTCLAKGFYPKDVLVRWLQGSQELPRENYKTTASVLDSDGSFFVYSKLTVAAEDWKKGDTFSCMVGHEALPLAFTQKSISRSP

SEQ ID NO: 195 - protein, 448 aa, Artificial Sequence
  Description of Artificial Sequence: Synthetic polypeptide
EVQLVESGGGLVQPGGSLRLSCAASGFNIKDTYIHWVRQAPGKGLEWVARIYPTNGYTRYADSVKGRFTISADTSKNTAYLQMNSLRAEDTAVYYCSRWGGDGFYAMDYWGQGTLVTVSSASTKGPSVFPLAPSSKSTSGGTAALGCLVKDYFPEPVTVSWNSGALTSGVHTFPAVLQSSGLYSLSSVVTVPSSSLGTQTYICNVNHKPSNTKVDKKVEPKSCDKTHTCPPCPAPELLGGPSVFLFRPALEDLLLGSEANVTCVVVDVSHEDPEVKFNWYVDGVEVHNAKTKPREEQYNSTYRVVSVLTVLHQDWYNGKEYKCKVSNKALPAPIEKTISKAGQPREPQVYLLPPSRDELTKNQVSLTCLAKGFYPKDVLVRWLQGSQELPRENYKTTASVLDSDGSFFVYSKLTVAAEDWKKGDTFSCMVGHEALPLAFTQKSISRSP

SEQ ID NO: 196 - protein, 448 aa, Artificial Sequence
  Description of Artificial Sequence: Synthetic polypeptide
EVQLVESGGGLVQPGGSLRLSCAASGFNIKDTYIHWVRQAPGKGLEWVARIYPTNGYTRYADSVKGRFTISADTSKNTAYLQMNSLRAEDTAVYYCSRWGGDGFYAMDYWGQGTLVTVSSASTKGPSVFPLAPSSKSTSGGTAALGCLVKDYFPEPVTVSWNSGALTSGVHTFPAVLQSSGLYSLSSVVTVPSSSLGTQTYICNVNHKPSNTKVDKKVEPKSCDKTHTCPPCPAPELLGGPSVFLFRPALEDLLLGSEANVTCVVVDVSHEDPEVKFNWYVDGVEVHNAKTKPREEQYNSTYRVVSVLTVLHQDWLNGKEYKCKVSNKALPAPIEKTISKAGQPREPQVYLLPPSRDELTKNQVSLTCLAKGFYPKDVLVRWLQGDQELPRENYKTTASVLDSDGSFFVYSKLTVAAEDWKKGDTFSCMVGHEALPLAFTQKSISRSP

SEQ ID NO: 197 - protein, 448 aa, Artificial Sequence
  Description of Artificial Sequence: Synthetic polypeptide
EVQLVESGGGLVQPGGSLRLSCAASGFNIKDTYIHWVRQAPGKGLEWVARIYPTNGYTRYADSVKGRFTISADTSKNTAYLQMNSLRAEDTAVYYCSRWGGDGFYAMDYWGQGTLVTVSSASTKGPSVFPLAPSSKSTSGGTAALGCLVKDYFPEPVTVSWNSGALTSGVHTFPAVLQSSGLYSLSSVVTVPSSSLGTQTYICNVNHKPSNTKVDKKVEPKSCDKTHTCPPCPAPELLGGPSVFLFRPALEDLLLGSEANVTCVVVDVSHEDPEVKFNWYVDGVEVHNAKTKPREEQYNSTYRVVSVLTVLHQDWLNGKEYKCKVSNKALPAPIEKTISKAGQPREPQVYLLPPSRDELTKNQVSLTCLAKGFYPKDVLVRWLQGSQELPRENYKTTASVLDSDGSFFVYSKLTVAAEDWKKGDTFSCYVGHEALPLAFTQKSISRSP

SEQ ID NO: 198 - protein, 448 aa, Artificial Sequence
  Description of Artificial Sequence: Synthetic polypeptide
EVQLVESGGGLVQPGGSLRLSCAASGFNIKDTYIHWVRQAPGKGLEWVARIYPTNGYTRYADSVKGRFTISADTSKNTAYLQMNSLRAEDTAVYYCSRWGGDGFYAMDYWGQGTLVTVSSASTKGPSVFPLAPSSKSTSGGTAALGCLVKDYFPEPVTVSWNSGALTSGVHTFPAVLQSSGLYSLSSVVTVPSSSLGTQTYICNVNHKPSNTKVDKKVEPKSCDKTHTCPPCPAPELLGGPSVFLFRPALEDLLLGSEANVTCVVVDVSHEDPEVKFNWYVDGVEVHNAKTKPREEQYNSTYRVVSVLTVLHQDWLNGKEYKCKVSNKALPAPIEKTISKAGQPREPQVYLLPPSRDELTKNQVSLTCLAKGFYPKDVLVRWLQGSQELPRENYKTTASVLDSDGSFFVYSKLTVAAEDWKKGDTFSCMVGHEALPLAFTYKSISRSP

SEQ ID NO: 199 - protein, 448 aa, Artificial Sequence
  Description of Artificial Sequence: Synthetic polypeptide
EVQLVESGGGLVQPGGSLRLSCAASGFNIKDTYIHWVRQAPGKGLEWVARIYPTNGYTRYADSVKGRFTISADTSKNTAYLQMNSLRAEDTAVYYCSRWGGDGFYAMDYWGQGTLVTVSSASTKGPSVFPLAPSSKSTSGGTAALGCLVKDYFPEPVTVSWNSGALTSGVHTFPAVLQSSGLYSLSSVVTVPSSSLGTQTYICNVNHKPSNTKVDKKVEPKSCDKTHTCPPCPAPELLGGPSVFLFRPALEDLLLGSEANVTCVVVDVSHEDPEVKFNWYVDGVEVHNAKTKPREEQYNSTYRVVSVLTVLHEDWYNGKEYKCKVSNKALPAPIEKTISKAGQPREPQVYLLPPSRDELTKNQVSLTCLAKGFYPKDVLVRWLQGSQELPRENYKTTASVLDSDGSFFVYSKLTVAAEDWKKGDTFSCMVGHEALPLAFTQKSISRSP

SEQ ID NO: 200 - protein, 440 aa, Artificial Sequence
  Description of Artificial Sequence: Synthetic polypeptide
EVQLVESGGGLVQPGGSLRLSCAASGFNIKDTYIHWVRQAPGKGLEWVARIYPTNGYTRYADSVKGRFTISADTSKNTAYLQMNSLRAEDTAVYYCSRWGGDGFYAMDYWGQGTLVTVSSASPTSPKVFPLSLDSTPQDGNVVVACLVQGFFPQEPLSVTWSESGQNVTARNFPPSQDASGDLYTTSSQLTLPATQCPDGKSVTCHVKHYTNPSQDVTVPCRVPPPPPCCHPRLSLHRPALEDLLLGSEANLTCTLTGLRDASGATFTWTPSSGKSAVQGPPERDLCGCYSVSSVLPGCAQPWNHGETFTCTAAHPELKTPLTANITKSGNTFRPEVHLLPPPSEELALNELVTLTCLARGFSPKDVLVRWLQGSQELPREKYLTWASRQEPSQGTTTFAVTSILRVAAEDWKKGDTFSCYVGHEALPLAFTYKTIDRLA

SEQ ID NO: 201 - protein, 440 aa, Artificial Sequence
  Description of Artificial Sequence: Synthetic polypeptide
EVQLVESGGGLVQPGGSLRLSCAASGFNIKDTYIHWVRQAPGKGLEWVARIYPTNGYTRYADSVKGRFTISADTSKNTAYLQMNSLRAEDTAVYYCSRWGGDGFYAMDYWGQGTLVTVSSASPTSPKVFPLSLDSTPQDGNVVVACLVQGFFPQEPLSVTWSESGQNVTARNFPPSQDASGDLYTTSSQLTLPATQCPDGKSVTCHVKHYTNPSQDVTVPCRVPPPPPCCHPRLSLHRPALEDLLLGSEANLTCTLTGLRDASGATFTWTPSSGKSAVQGPPERDLCGCYSVSSVLPGCAQPWNHGETFTCTAAHPELKTPLTANITKSGNTFRPEVHLLPPPSEELALNELVTLTCLARGFSPKDVLVRWLQGDQELPREKYLTWASRQEPSQGTTTFAVTSILRVAAEDWKKGDTFSCYVGHEALPLAFTYKTIDRLA

SEQ ID NO: 202 - protein, 440 aa, Artificial Sequence
  Description of Artificial Sequence: Synthetic polypeptide
EVQLVESGGGLVQPGGSLRLSCAASGFNIKDTYIHWVRQAPGKGLEWVARIYPTNGYTRYADSVKGRFTISADTSKNTAYLQMNSLRAEDTAVYYCSRWGGDGFYAMDYWGQGTLVTVSSASPTSPKVFPLSLDSTPQDGNVVVACLVQGFFPQEPLSVTWSESGQNVTARNFPPSQDASGDLYTTSSQLTLPATQCPDGKSVTCHVKHYTNPSQDVTVPCRVPPPPPCCHPRLSLHRPALEDLLLGSEANLTCTLTGLRDASGATFTWTPSSGKSAVQGPPERDLCGCYSVSSVLPGCAEPWYHGETFTCTAAHPELKTPLTANITKSGNTFRPEVHLLPPPSEELALNELVTLTCLARGFSPKDVLVRWLQGDQELPREKYLTWASRQEPSQGTTTFAVTSILRVAAEDWKKGDTFSCMVGHEALPLAFTQKTIDRLA

SEQ ID NO: 203 - protein, 440 aa, Artificial Sequence
  Description of Artificial Sequence: Synthetic polypeptide
EVQLVESGGGLVQPGGSLRLSCAASGFNIKDTYIHWVRQAPGKGLEWVARIYPTNGYTRYADSVKGRFTISADTSKNTAYLQMNSLRAEDTAVYYCSRWGGDGFYAMDYWGQGTLVTVSSASPTSPKVFPLSLDSTPQDGNVVVACLVQGFFPQEPLSVTWSESGQNVTARNFPPSQDASGDLYTTSSQLTLPATQCPDGKSVTCHVKHYTNPSQDVTVPCRVPPPPPCCHPRLSLHRPALEDLLLGSEANLTCTLTGLRDASGATFTWTPSSGKSAVQGPPERDLCGCYSVSSVLPGCAEPWYHGETFTCTAAHPELKTPLTANITKSGNTFRPEVHLLPPPSEELALNELVTLTCLARGFSPKDVLVRWLQGSQELPREKYLTWASRQEPSQGTTTFAVTSILRVAAEDWKKGDTFSCYVGHEALPLAFTYKTIDRLA

SEQ ID NO: 204 - protein, 440 aa, Artificial Sequence
  Description of Artificial Sequence: Synthetic polypeptide
EVQLVESGGGLVQPGGSLRLSCAASGFNIKDTYIHWVRQAPGKGLEWVARIYPTNGYTRYADSVKGRFTISADTSKNTAYLQMNSLRAEDTAVYYCSRWGGDGFYAMDYWGQGTLVTVSSASPTSPKVFPLSLDSTPQDGNVVVACLVQGFFPQEPLSVTWSESGQNVTARNFPPSQDASGDLYTTSSQLTLPATQCPDGKSVTCHVKHYTNPSQDVTVPCRVPPPPPCCHPRLSLHRPALEDLLLGSEANLTCTLTGLRDASGATFTWTPSSGKSAVQGPPERDLCGCYSVSSVLPGCAEPWYHGETFTCTAAHPELKTPLTANITKSGNTFRPEVHLLPPPSEELALNELVTLTCLARGFSPKDVLVRWLQGDQELPREKYLTWASRQEPSQGTTTFAVTSILRVAAEDWKKGDTFSCYVGHEALPLAFTYKTIDRLA

SEQ ID NO: 205 - protein, 444 aa, Artificial Sequence
  Description of Artificial Sequence: Synthetic polypeptide
EVQLVESGGGLVQPGGSLRLSCAASGFNIKDTYIHWVRQAPGKGLEWVARIYPTNGYTRYADSVKGRFTISADTSKNTAYLQMNSLRAEDTAVYYCSRWGGDGFYAMDYWGQGTLVTVSSASTKGPSVFPLAPSSKSTSGGTAALGCLVKDYFPEPVTVSWNSGALTSGVHTFPAVLQSSGLYSLSSVVTVPSSSLGTQTYICNVNHKPSNTKVDKKVEPKSCDKTHTCPPCPCCHPRVFLFRPALEDLLLGSEANVTCVVTGLRDEDPEVKFNWYVDGVEVHNAKTKPREEQYCGCYSVVSVLTVLHQDWLNGKEYKCKVSNKALPAPIEKTISKAGQPREPQVYLLPPSRDELTKNQVSLTCLAKGFYPKDVLVRWLQGSQELPRENYKTTASVLDSDGSFFVYSKLTVAAEDWKKGDTFSCYVGHEALPLAFTYKSISRSP

SEQ ID NO: 206 - protein, 444 aa, Artificial Sequence
  Description of Artificial Sequence: Synthetic polypeptide
EVQLVESGGGLVQPGGSLRLSCAASGFNIKDTYIHWVRQAPGKGLEWVARIYPTNGYTRYADSVKGRFTISADTSKNTAYLQMNSLRAEDTAVYYCSRWGGDGFYAMDYWGQGTLVTVSSASTKGPSVFPLAPSSKSTSGGTAALGCLVKDYFPEPVTVSWNSGALTSGVHTFPAVLQSSGLYSLSSVVTVPSSSLGTQTYICNVNHKPSNTKVDKKVEPKSCDKTHTCPPCPCCHPRVFLFRPALEDLLLGSEANVTCVVTGLRDEDPEVKFNWYVDGVEVHNAKTKPREEQYCGCYSVVSVLTVLHQDWLNGKEYKCKVSNKALPAPIEKTISKAGQPREPQVYLLPPSRDELTKNQVSLTCLAKGFYPKDVLVRWLQGDQELPRENYKTTASVLDSDGSFFVYSKLTVAAEDWKKGDTFSCYVGHEALPLAFTYKSISRSP

SEQ ID NO: 207 - protein, 444 aa, Artificial Sequence
  Description of Artificial Sequence: Synthetic polypeptide
EVQLVESGGGLVQPGGSLRLSCAASGFNIKDTYIHWVRQAPGKGLEWVARIYPTNGYTRYADSVKGRFTISADTSKNTAYLQMNSLRAEDTAVYYCSRWGGDGFYAMDYWGQGTLVTVSSASTKGPSVFPLAPSSKSTSGGTAALGCLVKDYFPEPVTVSWNSGALTSGVHTFPAVLQSSGLYSLSSVVTVPSSSLGTQTYICNVNHKPSNTKVDKKVEPKSCDKTHTCPPCPCCHPRVFLFRPALEDLLLGSEANVTCVVTGLRDEDPEVKFNWYVDGVEVHNAKTKPREEQYCGCYSVVSVLTVLHEDWYNGKEYKCKVSNKALPAPIEKTISKAGQPREPQVYLLPPSRDELTKNQVSLTCLAKGFYPKDVLVRWLQGDQELPRENYKTTASVLDSDGSFFVYSKLTVAAEDWKKGDTFSCMVGHEALPLAFTQKSISRSP

SEQ ID NO: 208 - protein, 444 aa, Artificial Sequence
  Description of Artificial Sequence: Synthetic polypeptide
EVQLVESGGGLVQPGGSLRLSCAASGFNIKDTYIHWVRQAPGKGLEWVARIYPTNGYTRYADSVKGRFTISADTSKNTAYLQMNSLRAEDTAVYYCSRWGGDGFYAMDYWGQGTLVTVSSASTKGPSVFPLAPSSKSTSGGTAALGCLVKDYFPEPVTVSWNSGALTSGVHTFPAVLQSSGLYSLSSVVTVPSSSLGTQTYICNVNHKPSNTKVDKKVEPKSCDKTHTCPPCPCCHPRVFLFRPALEDLLLGSEANVTCVVTGLRDEDPEVKFNWYVDGVEVHNAKTKPREEQYCGCYSVVSVLTVLHEDWYNGKEYKCKVSNKALPAPIEKTISKAGQPREPQVYLLPPSRDELTKNQVSLTCLAKGFYPKDVLVRWLQGSQELPRENYKTTASVLDSDGSFFVYSKLTVAAEDWKKGDTFSCYVGHEALPLAFTYKSISRSP

SEQ ID NO: 209 - protein, 444 aa, Artificial Sequence
  Description of Artificial Sequence: Synthetic polypeptide
EVQLVESGGGLVQPGGSLRLSCAASGFNIKDTYIHWVRQAPGKGLEWVARIYPTNGYTRYADSVKGRFTISADTSKNTAYLQMNSLRAEDTAVYYCSRWGGDGFYAMDYWGQGTLVTVSSASTKGPSVFPLAPSSKSTSGGTAALGCLVKDYFPEPVTVSWNSGALTSGVHTFPAVLQSSGLYSLSSVVTVPSSSLGTQTYICNVNHKPSNTKVDKKVEPKSCDKTHTCPPCPCCHPRVFLFRPALEDLLLGSEANVTCVVTGLRDEDPEVKFNWYVDGVEVHNAKTKPREEQYCGCYSVVSVLTVLHEDWYNGKEYKCKVSNKALPAPIEKTISKAGQPREPQVYLLPPSRDELTKNQVSLTCLAKGFYPKDVLVRWLQGDQELPRENYKTTASVLDSDGSFFVYSKLTVAAEDWKKGDTFSCYVGHEALPLAFTYKSISRSP

SEQ ID NO: 210 - protein, 448 aa, Artificial Sequence
  Description of Artificial Sequence: Synthetic polypeptide
EVQLVESGGGLVQPGGSLRLSCAASGFNIKDTYIHWVRQAPGKGLEWVARIYPTNGYTRYADSVKGRFTISADTSKNTAYLQMNSLRAEDTAVYYCSRWGGDGFYAMDYWGQGTLVTVSSASTKGPSVFPLAPSSKSTSGGTAALGCLVKDYFPEPVTVSWNSGALTSGVHTFPAVLQSSGLYSLSSVVTVPSSSLGTQTYICNVNHKPSNTKVDKKVEPKSCDKTHTCPPCPAPELLGGPSVFLFRPALEDLLLGSEANVTCVVVDVSHEDPEVKFNWYVDGVEVHNAKTKPREEQYNSTYRVVSVLTVLHQDWLNGKEYKCKVSNKALPAPIEKTISKAGQPREPQVYLLPPSRDELTKNQVSLTCLAKGFYPKDVLVRWLQGSQELPRENYKTTASVLDSDGSFFVYSKLTVAAEDWKKGDTFSCYVGHEALPLAFTYKSISRSP

SEQ ID NO: 211 - protein, 448 aa, Artificial Sequence
  Description of Artificial Sequence: Synthetic polypeptide
EVQLVESGGGLVQPGGSLRLSCAASGFNIKDTYIHWVRQAPGKGLEWVARIYPTNGYTRYADSVKGRFTISADTSKNTAYLQMNSLRAEDTAVYYCSRWGGDGFYAMDYWGQGTLVTVSSASTKGPSVFPLAPSSKSTSGGTAALGCLVKDYFPEPVTVSWNSGALTSGVHTFPAVLQSSGLYSLSSVVTVPSSSLGTQTYICNVNHKPSNTKVDKKVEPKSCDKTHTCPPCPAPELLGGPSVFLFRPALEDLLLGSEANVTCVVVDVSHEDPEVKFNWYVDGVEVHNAKTKPREEQYNSTYRVVSVLTVLHQDWLNGKEYKCKVSNKALPAPIEKTISKAGQPREPQVYLLPPSRDELTKNQVSLTCLAKGFYPKDVLVRWLQGDQELPRENYKTTASVLDSDGSFFVYSKLTVAAEDWKKGDTFSCYVGHEALPLAFTYKSISRSP

SEQ ID NO: 212 - protein, 448 aa, Artificial Sequence
  Description of Artificial Sequence: Synthetic polypeptide
EVQLVESGGGLVQPGGSLRLSCAASGFNIKDTYIHWVRQAPGKGLEWVARIYPTNGYTRYADSVKGRFTISADTSKNTAYLQMNSLRAEDTAVYYCSRWGGDGFYAMDYWGQGTLVTVSSASTKGPSVFPLAPSSKSTSGGTAALGCLVKDYFPEPVTVSWNSGALTSGVHTFPAVLQSSGLYSLSSVVTVPSSSLGTQTYICNVNHKPSNTKVDKKVEPKSCDKTHTCPPCPAPELLGGPSVFLFRPALEDLLLGSEANVTCVVVDVSHEDPEVKFNWYVDGVEVHNAKTKPREEQYNSTYRVVSVLTVLHEDWYNGKEYKCKVSNKALPAPIEKTISKAGQPREPQVYLLPPSRDELTKNQVSLTCLAKGFYPKDVLVRWLQGDQELPRENYKTTASVLDSDGSFFVYSKLTVAAEDWKKGDTFSCMVGHEALPLAFTQKSISRSP

SEQ ID NO: 213 - protein, 448 aa, Artificial Sequence
  Description of Artificial Sequence: Synthetic polypeptide
EVQLVESGGGLVQPGGSLRLSCAASGFNIKDTYIHWVRQAPGKGLEWVARIYPTNGYTRYADSVKGRFTISADTSKNTAYLQMNSLRAEDTAVYYCSRWGGDGFYAMDYWGQGTLVTVSSASTKGPSVFPLAPSSKSTSGGTAALGCLVKDYFPEPVTVSWNSGALTSGVHTFPAVLQSSGLYSLSSVVTVPSSSLGTQTYICNVNHKPSNTKVDKKVEPKSCDKTHTCPPCPAPELLGGPSVFLFRPALEDLLLGSEANVTCVVVDVSHEDPEVKFNWYVDGVEVHNAKTKPREEQYNSTYRVVSVLTVLHEDWYNGKEYKCKVSNKALPAPIEKTISKAGQPREPQVYLLPPSRDELTKNQVSLTCLAKGFYPKDVLVRWLQGSQELPRENYKTTASVLDSDGSFFVYSKLTVAAEDWKKGDTFSCYVGHEALPLAFTYKSISRSP

SEQ ID NO: 214 - protein, 448 aa, Artificial Sequence
  Description of Artificial Sequence: Synthetic polypeptide
EVQLVESGGGLVQPGGSLRLSCAASGFNIKDTYIHWVRQAPGKGLEWVARIYPTNGYTRYADSVKGRFTISADTSKNTAYLQMNSLRAEDTAVYYCSRWGGDGFYAMDYWGQGTLVTVSSASTKGPSVFPLAPSSKSTSGGTAALGCLVKDYFPEPVTVSWNSGALTSGVHTFPAVLQSSGLYSLSSVVTVPSSSLGTQTYICNVNHKPSNTKVDKKVEPKSCDKTHTCPPCPAPELLGGPSVFLFRPALEDLLLGSEANVTCVVVDVSHEDPEVKFNWYVDGVEVHNAKTKPREEQYNSTYRVVSVLTVLHEDWYNGKEYKCKVSNKALPAPIEKTISKAGQPREPQVYLLPPSRDELTKNQVSLTCLAKGFYPKDVLVRWLQGDQELPRENYKTTASVLDSDGSFFVYSKLTVAAEDWKKGDTFSCYVGHEALPLAFTYKSISRSP

SEQ ID NO: 215 - protein, 440 aa, Artificial Sequence
  Description of Artificial Sequence: Synthetic polypeptide
EVQLVESGGGLVQPGGSLRLSCAASGFNIKDTYIHWVRQAPGKGLEWVARIYPTNGYTRYADSVKGRFTISADTSKNTAYLQMNSLRAEDTAVYYCSRWGGDGFYAMDYWGQGTLVTVSSASPTSPKVFPLSLDSTPQDGNVVVACLVQGFFPQEPLSVTWSESGQNVTARNFPPSQDASGDLYTTSSQLTLPATQCPDGKSVTCHVKHYTNPSQDVTVPCRVPPPPPCCHPRLSLHRPSLEDLLLGSEANLTCTLTGLRDASGATFTWTPSSGKSAVQGPPERDLCGCYSVSSVLPGCAQPWNHGETFTCTAAHPELKTPLTANITKSGNTFRPEVHLLPPPSEELALNELVTLTCLARGFSPKDVLVRWLQGSQELPREKYLTWASRQEPSQGTTTFAVTSILRVAAEDWKKGDTFSCMVGHEALPLAFTQKTIDRLA

SEQ ID NO: 216 - protein, 440 aa, Artificial Sequence
  Description of Artificial Sequence: Synthetic polypeptide
EVQLVESGGGLVQPGGSLRLSCAASGFNIKDTYIHWVRQAPGKGLEWVARIYPTNGYTRYADSVKGRFTISADTSKNTAYLQMNSLRAEDTAVYYCSRWGGDGFYAMDYWGQGTLVTVSSASPTSPKVFPLSLDSTPQDGNVVVACLVQGFFPQEPLSVTWSESGQNVTARNFPPSQDASGDLYTTSSQLTLPATQCPDGKSVTCHVKHYTNPSQDVTVPCRVPPPPPCCHPRLSLHRPALEDLLLGSEANLTCTLTGLRDASGATFTWTPSSGKSAVQGPPERDLCGCYSVSSVIPGCAQPWNHGETFTCTAAHPELKTPLTANITKSGNTFRPEVHLLPPPSEELALNELVTLTCLARGFSPKDVLVRWLQGSQELPREKYLTWASRQEPSQGTTTFAVTSILRVAAEDWKKGDTFSCMVGHEALPLAFTQKTIDRLA

SEQ ID NO: 217 - protein, 440 aa, Artificial Sequence
  Description of Artificial Sequence: Synthetic polypeptide
EVQLVESGGGLVQPGGSLRLSCAASGFNIKDTYIHWVRQAPGKGLEWVARIYPTNGYTRYADSVKGRFTISADTSKNTAYLQMNSLRAEDTAVYYCSRWGGDGFYAMDYWGQGTLVTVSSASPTSPKVFPLSLDSTPQDGNVVVACLVQGFFPQEPLSVTWSESGQNVTARNFPPSQDASGDLYTTSSQLTLPATQCPDGKSVTCHVKHYTNPSQDVTVPCRVPPPPPCCHPRLSLHRPALEDLLLGSEANLTCTLTGLRDASGATFTWTPSSGKSAVQGPPERDLCGCYSVSSVLPVCAQPWNHGETFTCTAAHPELKTPLTANITKSGNTFRPEVHLLPPPSEELALNELVTLTCLARGFSPKDVLVRWLQGSQELPREKYLTWASRQEPSQGTTTFAVTSILRVAAEDWKKGDTFSCMVGHEALPLAFTQKTIDRLA

SEQ ID NO: 218 - protein, 440 aa, Artificial Sequence
  Description of Artificial Sequence: Synthetic polypeptide
EVQLVESGGGLVQPGGSLRLSCAASGFNIKDTYIHWVRQAPGKGLEWVARIYPTNGYTRYADSVKGRFTISADTSKNTAYLQMNSLRAEDTAVYYCSRWGGDGFYAMDYWGQGTLVTVSSASPTSPKVFPLSLDSTPQDGNVVVACLVQGFFPQEPLSVTWSESGQNVTARNFPPSQDASGDLYTTSSQLTLPATQCPDGKSVTCHVKHYTNPSQDVTVPCRVPPPPPCCHPRLSLHRPALEDLLLGSEANLTCTLTGLRDASGATFTWTPSSGKSAVQGPPERDLCGCYSVSSVLPGCAQPWNHWETFTCTAAHPELKTPLTANITKSGNTFRPEVHLLPPPSEELALNELVTLTCLARGFSPKDVLVRWLQGSQELPREKYLTWASRQEPSQGTTTFAVTSILRVAAEDWKKGDTFSCMVGHEALPLAFTQKTIDRLA

SEQ ID NO: 219 - protein, 440 aa, Artificial Sequence
  Description of Artificial Sequence: Synthetic polypeptide
EVQLVESGGGLVQPGGSLRLSCAASGFNIKDTYIHWVRQAPGKGLEWVARIYPTNGYTRYADSVKGRFTISADTSKNTAYLQMNSLRAEDTAVYYCSRWGGDGFYAMDYWGQGTLVTVSSASPTSPKVFPLSLDSTPQDGNVVVACLVQGFFPQEPLSVTWSESGQNVTARNFPPSQDASGDLYTTSSQLTLPATQCPDGKSVTCHVKHYTNPSQDVTVPCRVPPPPPCCHPRLSLHRPALEDLLLGSEANLTCTLTGLRDASGATFTWTPSSGKSAVQGPPERDLCGCYSVSSVLPGCAQPWNHGETFTCTAAHPELKTPLTANITKSGNTFRPEVHLLPPPSEELALNELVTLTCLARGFSPKDVLVRWLQGSQELPREKYLTWASRQEPSQGTTTFAVTSILRVAAEDWKKGDTFSCMVGHDALPLAFTQKTIDRLA

SEQ ID NO: 220 - protein, 440 aa, Artificial Sequence
  Description of Artificial Sequence: Synthetic polypeptide
EVQLVESGGGLVQPGGSLRLSCAASGFNIKDTYIHWVRQAPGKGLEWVARIYPTNGYTRYADSVKGRFTISADTSKNTAYLQMNSLRAEDTAVYYCSRWGGDGFYAMDYWGQGTLVTVSSASPTSPKVFPLSLDSTPQDGNVVVACLVQGFFPQEPLSVTWSESGQNVTARNFPPSQDASGDLYTTSSQLTLPATQCPDGKSVTCHVKHYTNPSQDVTVPCRVPPPPPCCHPRLSLHRPALEDLLLGSEANLTCTLTGLRDASGATFTWTPSSGKSAVQGPPERDLCGCYSVSSVLPGCAQPWNHGETFTCTAAHPELKTPLTANITKSGNTFRPEVHLLPPPSEELALNELVTLTCLARGFSPKDVLVRWLQGSQELPREKYLTWASRQEPSQGTTTFAVTSILRVAAEDWKKGDTFSCMVGHEALPLAFTQKTIDRFA

SEQ ID NO: 221 - protein, 440 aa, Artificial Sequence
  Description of Artificial Sequence: Synthetic polypeptide
EVQLVESGGGLVQPGGSLRLSCAASGFNIKDTYIHWVRQAPGKGLEWVARIYPTNGYTRYADSVKGRFTISADTSKNTAYLQMNSLRAEDTAVYYCSRWGGDGFYAMDYWGQGTLVTVSSASPTSPKVFPLSLDSTPQDGNVVVACLVQGFFPQEPLSVTWSESGQNVTARNFPPSQDASGDLYTTSSQLTLPATQCPDGKSVTCHVKHYTNPSQDVTVPCRVPPPPPCCHPRLSLHRPALEDLLLGSEANLTCTLTGLRDASGATFTWTPSSGKSAVQGPPERDLCGCYSVSSVIPVCAEPWYHWETFTCTAAHPELKTPLTANITKSGNTFRPEVHLLPPPSEELALNELVTLTCLARGFSPKDVLVRWLQGSQELPREKYLTWASRQEPSQGTTTFAVTSILRVAAEDWKKGDTFSCMVGHEALPLAFTQKTIDRLA

SEQ ID NO: 222 - protein, 440 aa, Artificial Sequence
  Description of Artificial Sequence: Synthetic polypeptide
EVQLVESGGGLVQPGGSLRLSCAASGFNIKDTYIHWVRQAPGKGLEWVARIYPTNGYTRYADSVKGRFTISADTSKNTAYLQMNSLRAEDTAVYYCSRWGGDGFYAMDYWGQGTLVTVSSASPTSPKVFPLSLDSTPQDGNVVVACLVQGFFPQEPLSVTWSESGQNVTARNFPPSQDASGDLYTTSSQLTLPATQCPDGKSVTCHVKHYTNPSQDVTVPCRVPPPPPCCHPRLSLHRPALEDLLLGSEANLTCTLTGLRDASGATFTWTPSSGKSAVQGPPERDLCGCYSVSSVLPGCAQPWHHGETFTCTAAHPELKTPLTANITKSGNTFRPEVHLLPPPSEELALNELVTLTCLARGFSPKDVLVRWLQGSQELPREKYLTWASRQEPSQGTTTFAVTSILRVAAEDWKKGDTFSCMVGHEALPLAFTQKTIDRLA

SEQ ID NO: 223 - protein, 444 aa, Artificial Sequence
  Description of Artificial Sequence: Synthetic polypeptide
EVQLVESGGGLVQPGGSLRLSCAASGFNIKDTYIHWVRQAPGKGLEWVARIYPTNGYTRYADSVKGRFTISADTSKNTAYLQMNSLRAEDTAVYYCSRWGGDGFYAMDYWGQGTLVTVSSASTKGPSVFPLAPSSKSTSGGTAALGCLVKDYFPEPVTVSWNSGALTSGVHTFPAVLQSSGLYSLSSVVTVPSSSLGTQTYICNVNHKPSNTKVDKKVEPKSCDKTHTCPPCPCCHPRVFLFRPALEDLLLGSEANVTCVVTGLRDEDPEVKFNWYVDGVEVHNAKTKPREEQYCGCYSVVSVITVLHEDWYNWKEYKCKVSNKALPAPIEKTISKAGQPREPQVYLLPPSRDELTKNQVSLTCLAKGFYPKDVLVRWLQGSQELPRENYKTTASVLDSDGSFFVYSKLTVAAEDWKKGDTFSCMVGHEALPLAFTQKSISRSP

SEQ ID NO: 224 - protein, 448 aa, Artificial Sequence
  Description of Artificial Sequence: Synthetic polypeptide
EVQLVESGGGLVQPGGSLRLSCAASGFNIKDTYIHWVRQAPGKGLEWVARIYPTNGYTRYADSVKGRFTISADTSKNTAYLQMNSLRAEDTAVYYCSRWGGDGFYAMDYWGQGTLVTVSSASTKGPSVFPLAPSSKSTSGGTAALGCLVKDYFPEPVTVSWNSGALTSGVHTFPAVLQSSGLYSLSSVVTVPSSSLGTQTYICNVNHKPSNTKVDKKVEPKSCDKTHTCPPCPAPELLGGPSVFLFRPALEDLLLGSEANVTCVVVDVSHEDPEVKFNWYVDGVEVHNAKTKPREEQYNSTYRVVSVITVLHEDWYNWKEYKCKVSNKALPAPIEKTISKAGQPREPQVYLLPPSRDELTKNQVSLTCLAKGFYPKDVLVRWLQGSQELPRENYKTTASVLDSDGSFFVYSKLTVAAEDWKKGDTFSCMVGHEALPLAFTQKSISRSP

SEQ ID NO: 225 - protein, 440 aa, Artificial Sequence
  Description of Artificial Sequence: Synthetic polypeptide
EVQLVESGGGLVQPGGSLRLSCAASGFNIKDTYIHWVRQAPGKGLEWVARIYPTNGYTRYADSVKGRFTISADTSKNTAYLQMNSLRAEDTAVYYCSRWGGDGFYAMDYWGQGTLVTVSSASPTSPKVFPLSLDSTPQDGNVVVACLVQGFFPQEPLSVTWSESGQNVTARNFPPSQDASGDLYTTSSQLTLPATQCPDGKSVTCHVKHYTNPSQDVTVPCRVPPPPPCCHPRLSLHRPALEDLLLGSEANLTCTLTGLRDASGATFTWTPSSGKSAVQGPPERDLCGCYSVSSVLPGCAEPWNHGETFTCTAAHPELKTPLTANITKSGNTFRPEVHLLPPPSEELALNELVTLTCLARGFSPKDVLVRWLQGDQELPREKYLTWASRQEPSQGTTTFAVTSILRVAAEDWKKGDTFSCMVGHEALPLAFTQKTIDRLA

SEQ ID NO: 226 - protein, 440 aa, Artificial Sequence
  Description of Artificial Sequence: Synthetic polypeptide
EVQLVESGGGLVQPGGSLRLSCAASGFNIKDTYIHWVRQAPGKGLEWVARIYPTNGYTRYADSVKGRFTISADTSKNTAYLQMNSLRAEDTAVYYCSRWGGDGFYAMDYWGQGTLVTVSSASPTSPKVFPLSLDSTPQDGNVVVACLVQGFFPQEPLSVTWSESGQNVTARNFPPSQDASGDLYTTSSQLTLPATQCPDGKSVTCHVKHYTNPSQDVTVPCRVPPPPPCCHPRLSLHRPALEDLLLGSEANLTCTLTGLRDASGATFTWTPSSGKSAVQGPPERDLCGCYSVSSVLPGCAEPWNHGETFTCTAAHPELKTPLTANITKSGNTFRPEVHLLPPPSEELALNELVTLTCLARGFSPKDVLVRWLQGSQELPREKYLTWASRQEPSQGTTTFAVTSILRVAAEDWKKGDTFSCYVGHEALPLAFTQKTIDRLA

SEQ ID NO: 227 - protein, 440 aa, Artificial Sequence
  Description of Artificial Sequence: Synthetic polypeptide
EVQLVESGGGLVQPGGSLRLSCAASGFNIKDTYIHWVRQAPGKGLEWVARIYPTNGYTRYADSVKGRFTISADTSKNTAYLQMNSLRAEDTAVYYCSRWGGDGFYAMDYWGQGTLVTVSSASPTSPKVFPLSLDSTPQDGNVVVACLVQGFFPQEPLSVTWSESGQNVTARNFPPSQDASGDLYTTSSQLTLPATQCPDGKSVTCHVKHYTNPSQDVTVPCRVPPPPPCCHPRLSLHRPALEDLLLGSEANLTCTLTGLRDASGATFTWTPSSGKSAVQGPPERDLCGCYSVSSVLPGCAQPWYHGETFTCTAAHPELKTPLTANITKSGNTFRPEVHLLPPPSEELALNELVTLTCLARGFSPKDVLVRWLQGDQELPREKYLTWASRQEPSQGTTTFAVTSILRVAAEDWKKGDTFSCMVGHEALPLAFTQKTIDRLA

SEQ ID NO: 228 - protein, 440 aa, Artificial Sequence
  Description of Artificial Sequence: Synthetic polypeptide
EVQLVESGGGLVQPGGSLRLSCAASGFNIKDTYIHWVRQAPGKGLEWVARIYPTNGYTRYADSVKGRFTISADTSKNTAYLQMNSLRAEDTAVYYCSRWGGDGFYAMDYWGQGTLVTVSSASPTSPKVFPLSLDSTPQDGNVVVACLVQGFFPQEPLSVTWSESGQNVTARNFPPSQDASGDLYTTSSQLTLPATQCPDGKSVTCHVKHYTNPSQDVTVPCRVPPPPPCCHPRLSLHRPALEDLLLGSEANLTCTLTGLRDASGATFTWTPSSGKSAVQGPPERDLCGCYSVSSVLPGCAQPWYHGETFTCTAAHPELKTPLTANITKSGNTFRPEVHLLPPPSEELALNELVTLTCLARGFSPKDVLVRWLQGSQELPREKYLTWASRQEPSQGTTTFAVTSILRVAAEDWKKGDTFSCYVGHEALPLAFTQKTIDRLA

SEQ ID NO: 229 - protein, 440 aa, Artificial Sequence
  Description of Artificial Sequence: Synthetic polypeptide
EVQLVESGGGLVQPGGSLRLSCAASGFNIKDTYIHWVRQAPGKGLEWVARIYPTNGYTRYADSVKGRFTISADTSKNTAYLQMNSLRAEDTAVYYCSRWGGDGFYAMDYWGQGTLVTVSSASPTSPKVFPLSLDSTPQDGNVVVACLVQGFFPQEPLSVTWSESGQNVTARNFPPSQDASGDLYTTSSQLTLPATQCPDGKSVTCHVKHYTNPSQDVTVPCRVPPPPPCCHPRLSLHRPALEDLLLGSEANLTCTLTGLRDASGATFTWTPSSGKSAVQGPPERDLCGCYSVSSVLPGCAQPWNHGETFTCTAAHPELKTPLTANITKSGNTFRPEVHLLPPPSEELALNELVTLTCLARGFSPKDVLVRWLQGDQELPREKYLTWASRQEPSQGTTTFAVTSILRVAAEDWKKGDTFSCYVGHEALPLAFTQKTIDRLA

SEQ ID NO: 230 - protein, 440 aa, Artificial Sequence
  Description of Artificial Sequence: Synthetic polypeptide
EVQLVESGGGLVQPGGSLRLSCAASGFNIKDTYIHWVRQAPGKGLEWVARIYPTNGYTRYADSVKGRFTISADTSKNTAYLQMNSLRAEDTAVYYCSRWGGDGFYAMDYWGQGTLVTVSSASPTSPKVFPLSLDSTPQDGNVVVACLVQGFFPQEPLSVTWSESGQNVTARNFPPSQDASGDLYTTSSQLTLPATQCPDGKSVTCHVKHYTNPSQDVTVPCRVPPPPPCCHPRLSLHRPALEDLLLGSEANLTCTLTGLRDASGATFTWTPSSGKSAVQGPPERDLCGCYSVSSVLPGCAEPWYHGETFTCTAAHPELKTPLTANITKSGNTFRPEVHLLPPPSEELALNELVTLTCLARGFSPKDVLVRWLQGSQELPREKYLTWASRQEPSQGTTTFAVTSILRVAAEDWKKGDTFSCYVGHEALPLAFTQKTIDRLA

SEQ ID NO: 231 - protein, 440 aa, Artificial Sequence
  Description of Artificial Sequence: Synthetic polypeptide
EVQLVESGGGLVQPGGSLRLSCAASGFNIKDTYIHWVRQAPGKGLEWVARIYPTNGYTRYADSVKGRFTISADTSKNTAYLQMNSLRAEDTAVYYCSRWGGDGFYAMDYWGQGTLVTVSSASPTSPKVFPLSLDSTPQDGNVVVACLVQGFFPQEPLSVTWSESGQNVTARNFPPSQDASGDLYTTSSQLTLPATQCPDGKSVTCHVKHYTNPSQDVTVPCRVPPPPPCCHPRLSLHRPALEDLLLGSEANLTCTLTGLRDASGATFTWTPSSGKSAVQGPPERDLCGCYSVSSVLPGCAQPWYHGETFTCTAAHPELKTPLTANITKSGNTFRPEVHLLPPPSEELALNELVTLTCLARGFSPKDVLVRWLQGDQELPREKYLTWASRQEPSQGTTTFAVTSILRVAAEDWKKGDTFSCYVGHEALPLAFTQKTIDRLA

SEQ ID NO: 232 - protein, 440 aa, Artificial Sequence
  Description of Artificial Sequence: Synthetic polypeptide
EVQLVESGGGLVQPGGSLRLSCAASGFNIKDTYIHWVRQAPGKGLEWVARIYPTNGYTRYADSVKGRFTISADTSKNTAYLQMNSLRAEDTAVYYCSRWGGDGFYAMDYWGQGTLVTVSSASPTSPKVFPLSLDSTPQDGNVVVACLVQGFFPQEPLSVTWSESGQNVTARNFPPSQDASGDLYTTSSQLTLPATQCPDGKSVTCHVKHYTNPSQDVTVPCRVPPPPPCCHPRLSLHRPALEDLLLGSEANLTCTLTGLRDASGATFTWTPSSGKSAVQGPPERDLCGCYSVSSVLPGCAEPWNHGETFTCTAAHPELKTPLTANITKSGNTFRPEVHLLPPPSEELALNELVTLTCLARGFSPKDVLVRWLQGDQELPREKYLTWASRQEPSQGTTTFAVTSILRVAAEDWKKGDTFSCYVGHEALPLAFTQKTIDRLA

SEQ ID NO: 233 - protein, 440 aa, Artificial Sequence
  Description of Artificial Sequence: Synthetic polypeptide
EVQLVESGGGLVQPGGSLRLSCAASGFNIKDTYIHWVRQAPGKGLEWVARIYPTNGYTRYADSVKGRFTISADTSKNTAYLQMNSLRAEDTAVYYCSRWGGDGFYAMDYWGQGTLVTVSSASPTSPKVFPLSLDSTPQDGNVVVACLVQGFFPQEPLSVTWSESGQNVTARNFPPSQDASGDLYTTSSQLTLPATQCPDGKSVTCHVKHYTNPSQDVTVPCRVPPPPPCCHPRLSLHRPALEDLLLGSEANLTCTLTGLRDASGATFTWTPSSGKSAVQGPPERDLCGCYSVSSVLPGCAEPWYHGETFTCTAAHPELKTPLTANITKSGNTFRPEVHLLPPPSEELALNELVTLTCLARGFSPKDVLVRWLQGDQELPREKYLTWASRQEPSQGTTTFAVTSILRVAAEDWKKGDTFSCYVGHEALPLAFTQKTIDRLA

SEQ ID NO: 234 - protein, 444 aa, Artificial Sequence
  Description of Artificial Sequence: Synthetic polypeptide
EVQLVESGGGLVQPGGSLRLSCAASGFNIKDTYIHWVRQAPGKGLEWVARIYPTNGYTRYADSVKGRFTISADTSKNTAYLQMNSLRAEDTAVYYCSRWGGDGFYAMDYWGQGTLVTVSSASTKGPSVFPLAPSSKSTSGGTAALGCLVKDYFPEPVTVSWNSGALTSGVHTFPAVLQSSGLYSLSSVVTVPSSSLGTQTYICNVNHKPSNTKVDKKVEPKSCDKTHTCPPCPCCHPRVFLFRPALEDLLLGSEANVTCVVTGLRDEDPEVKFNWYVDGVEVHNAKTKPREEQYCGCYSVVSVLTVLHEDWLNGKEYKCKVSNKALPAPIEKTISKAGQPREPQVYLLPPSRDELTKNQVSLTCLAKGFYPKDVLVRWLQGDQELPRENYKTTASVLDSDGSFFVYSKLTVAAEDWKKGDTFSCMVGHEALPLAFTQKSISRSP

SEQ ID NO: 235 - protein, 444 aa, Artificial Sequence
  Description of Artificial Sequence: Synthetic polypeptide
EVQLVESGGGLVQPGGSLRLSCAASGFNIKDTYIHWVRQAPGKGLEWVARIYPTNGYTRYADSVKGRFTISADTSKNTAYLQMNSLRAEDTAVYYCSRWGGDGFYAMDYWGQGTLVTVSSASTKGPSVFPLAPSSKSTSGGTAALGCLVKDYFPEPVTVSWNSGALTSGVHTFPAVLQSSGLYSLSSVVTVPSSSLGTQTYICNVNHKPSNTKVDKKVEPKSCDKTHTCPPCPCCHPRVFLFRPALEDLLLGSEANVTCVVTGLRDEDPEVKFNWYVDGVEVHNAKTKPREEQYCGCYSVVSVLTVLHEDWLNGKEYKCKVSNKALPAPIEKTISKAGQPREPQVYLLPPSRDELTKNQVSLTCLAKGFYPKDVLVRWLQGSQELPRENYKTTASVLDSDGSFFVYSKLTVAAEDWKKGDTFSCYVGHEALPLAFTQKSISRSP

SEQ ID NO: 236 - protein, 444 aa, Artificial Sequence
  Description of Artificial Sequence: Synthetic polypeptide
EVQLVESGGGLVQPGGSLRLSCAASGFNIKDTYIHWVRQAPGKGLEWVARIYPTNGYTRYADSVKGRFTISADTSKNTAYLQMNSLRAEDTAVYYCSRWGGDGFYAMDYWGQGTLVTVSSASTKGPSVFPLAPSSKSTSGGTAALGCLVKDYFPEPVTVSWNSGALTSGVHTFPAVLQSSGLYSLSSVVTVPSSSLGTQTYICNVNHKPSNTKVDKKVEPKSCDKTHTCPPCPCCHPRVFLFRPALEDLLLGSEANVTCVVTGLRDEDPEVKFNWYVDGVEVHNAKTKPREEQYCGCYSVVSVLTVLHQDWYNGKEYKCKVSNKALPAPIEKTISKAGQPREPQVYLLPPSRDELTKNQVSLTCLAKGFYPKDVLVRWLQGDQELPRENYKTTASVLDSDGSFFVYSKLTVAAEDWKKGDTFSCMVGHEALPLAFTQKSISRSP

SEQ ID NO: 237 - protein, 444 aa, Artificial Sequence
  Description of Artificial Sequence: Synthetic polypeptide
EVQLVESGGGLVQPGGSLRLSCAASGFNIKDTYIHWVRQAPGKGLEWVARIYPTNGYTRYADSVKGRFTISADTSKNTAYLQMNSLRAEDTAVYYCSRWGGDGFYAMDYWGQGTLVTVSSASTKGPSVFPLAPSSKSTSGGTAALGCLVKDYFPEPVTVSWNSGALTSGVHTFPAVLQSSGLYSLSSVVTVPSSSLGTQTYICNVNHKPSNTKVDKKVEPKSCDKTHTCPPCPCCHPRVFLFRPALEDLLLGSEANVTCVVTGLRDEDPEVKFNWYVDGVEVHNAKTKPREEQYCGCYSVVSVLTVLHQDWYNGKEYKCKVSNKALPAPIEKTISKAGQPREPQVYLLPPSRDELTKNQVSLTCLAKGFYPKDVLVRWLQGSQELPRENYKTTASVLDSDGSFFVYSKLTVAAEDWKKGDTFSCYVGHEALPLAFTQKSISRSP

SEQ ID NO: 238 - protein, 444 aa, Artificial Sequence
  Description of Artificial Sequence: Synthetic polypeptide
EVQLVESGGGLVQPGGSLRLSCAASGFNIKDTYIHWVRQAPGKGLEWVARIYPTNGYTRYADSVKGRFTISADTSKNTAYLQMNSLRAEDTAVYYCSRWGGDGFYAMDYWGQGTLVTVSSASTKGPSVFPLAPSSKSTSGGTAALGCLVKDYFPEPVTVSWNSGALTSGVHTFPAVLQSSGLYSLSSVVTVPSSSLGTQTYICNVNHKPSNTKVDKKVEPKSCDKTHTCPPCPCCHPRVFLFRPALEDLLLGSEANVTCVVTGLRDEDPEVKFNWYVDGVEVHNAKTKPREEQYCGCYSVVSVLTVLHQDWLNGKEYKCKVSNKALPAPIEKTISKAGQPREPQVYLLPPSRDELTKNQVSLTCLAKGFYPKDVLVRWLQGDQELPRENYKTTASVLDSDGSFFVYSKLTVAAEDWKKGDTFSCYVGHEALPLAFTQKSISRSP

SEQ ID NO: 239 - protein, 444 aa, Artificial Sequence
  Description of Artificial Sequence: Synthetic polypeptide
EVQLVESGGGLVQPGGSLRLSCAASGFNIKDTYIHWVRQAPGKGLEWVARIYPTNGYTRYADSVKGRFTISADTSKNTAYLQMNSLRAEDTAVYYCSRWGGDGFYAMDYWGQGTLVTVSSASTKGPSVFPLAPSSKSTSGGTAALGCLVKDYFPEPVTVSWNSGALTSGVHTFPAVLQSSGLYSLSSVVTVPSSSLGTQTYICNVNHKPSNTKVDKKVEPKSCDKTHTCPPCPCCHPRVFLFRPALEDLLLGSEANVTCVVTGLRDEDPEVKFNWYVDGVEVHNAKTKPREEQYCGCYSVVSVLTVLHEDWYNGKEYKCKVSNKALPAPIEKTISKAGQPREPQVYLLPPSRDELTKNQVSLTCLAKGFYPKDVLVRWLQGSQELPRENYKTTASVLDSDGSFFVYSKLTVAAEDWKKGDTFSCYVGHEALPLAFTQKSISRSP

SEQ ID NO: 240 - protein, 444 aa, Artificial Sequence
  Description of Artificial Sequence: Synthetic polypeptide
EVQLVESGGGLVQPGGSLRLSCAASGFNIKDTYIHWVRQAPGKGLEWVARIYPTNGYTRYADSVKGRFTISADTSKNTAYLQMNSLRAEDTAVYYCSRWGGDGFYAMDYWGQGTLVTVSSASTKGPSVFPLAPSSKSTSGGTAALGCLVKDYFPEPVTVSWNSGALTSGVHTFPAVLQSSGLYSLSSVVTVPSSSLGTQTYICNVNHKPSNTKVDKKVEPKSCDKTHTCPPCPCCHPRVFLFRPALEDLLLGSEANVTCVVTGLRDEDPEVKFNWYVDGVEVHNAKTKPREEQYCGCYSVVSVLTVLHQDWYNGKEYKCKVSNKALPAPIEKTISKAGQPREPQVYLLPPSRDELTKNQVSLTCLAKGFYPKDVLVRWLQGDQELPRENYKTTASVLDSDGSFFVYSKLTVAAEDWKKGDTFSCYVGHEALPLAFTQKSISRSP

SEQ ID NO: 241 - protein, 444 aa, Artificial Sequence
  Description of Artificial Sequence: Synthetic polypeptide
EVQLVESGGGLVQPGGSLRLSCAASGFNIKDTYIHWVRQAPGKGLEWVARIYPTNGYTRYADSVKGRFTISADTSKNTAYLQMNSLRAEDTAVYYCSRWGGDGFYAMDYWGQGTLVTVSSASTKGPSVFPLAPSSKSTSGGTAALGCLVKDYFPEPVTVSWNSGALTSGVHTFPAVLQSSGLYSLSSVVTVPSSSLGTQTYICNVNHKPSNTKVDKKVEPKSCDKTHTCPPCPCCHPRVFLFRPALEDLLLGSEANVTCVVTGLRDEDPEVKFNWYVDGVEVHNAKTKPREEQYCGCYSVVSVLTVLHEDWLNGKEYKCKVSNKALPAPIEKTISKAGQPREPQVYLLPPSRDELTKNQVSLTCLAKGFYPKDVLVRWLQGDQELPRENYKTTASVLDSDGSFFVYSKLTVAAEDWKKGDTFSCYVGHEALPLAFTQKSISRSP

SEQ ID NO: 242 - protein, 444 aa, Artificial Sequence
  Description of Artificial Sequence: Synthetic polypeptide
EVQLVESGGGLVQPGGSLRLSCAASGFNIKDTYIHWVRQAPGKGLEWVARIYPTNGYTRYADSVKGRFTISADTSKNTAYLQMNSLRAEDTAVYYCSRWGGDGFYAMDYWGQGTLVTVSSASTKGPSVFPLAPSSKSTSGGTAALGCLVKDYFPEPVTVSWNSGALTSGVHTFPAVLQSSGLYSLSSVVTVPSSSLGTQTYICNVNHKPSNTKVDKKVEPKSCDKTHTCPPCPCCHPRVFLFRPALEDLLLGSEANVTCVVTGLRDEDPEVKFNWYVDGVEVHNAKTKPREEQYCGCYSVVSVLTVLHEDWYNGKEYKCKVSNKALPAPIEKTISKAGQPREPQVYLLPPSRDELTKNQVSLTCLAKGFYPKDVLVRWLQGDQELPRENYKTTASVLDSDGSFFVYSKLTVAAEDWKKGDTFSCYVGHEALPLAFTQKSISRSP

SEQ ID NO: 243 - protein, 448 aa, Artificial Sequence
  Description of Artificial Sequence: Synthetic polypeptide
EVQLVESGGGLVQPGGSLRLSCAASGFNIKDTYIHWVRQAPGKGLEWVARIYPTNGYTRYADSVKGRFTISADTSKNTAYLQMNSLRAEDTAVYYCSRWGGDGFYAMDYWGQGTLVTVSSASTKGPSVFPLAPSSKSTSGGTAALGCLVKDYFPEPVTVSWNSGALTSGVHTFPAVLQSSGLYSLSSVVTVPSSSLGTQTYICNVNHKPSNTKVDKKVEPKSCDKTHTCPPCPAPELLGGPSVFLFRPALEDLLLGSEANVTCVVVDVSHEDPEVKFNWYVDGVEVHNAKTKPREEQYNSTYRVVSVLTVLHEDWLNGKEYKCKVSNKALPAPIEKTISKAGQPREPQVYLLPPSRDELTKNQVSLTCLAKGFYPKDVLVRWLQGDQELPRENYKTTASVLDSDGSFFVYSKLTVAAEDWKKGDTFSCMVGHEALPLAFTQKSISRSP

SEQ ID NO: 244 - protein, 448 aa, Artificial Sequence
  Description of Artificial Sequence: Synthetic polypeptide
EVQLVESGGGLVQPGGSLRLSCAASGFNIKDTYIHWVRQAPGKGLEWVARIYPTNGYTRYADSVKGRFTISADTSKNTAYLQMNSLRAEDTAVYYCSRWGGDGFYAMDYWGQGTLVTVSSASTKGPSVFPLAPSSKSTSGGTAALGCLVKDYFPEPVTVSWNSGALTSGVHTFPAVLQSSGLYSLSSVVTVPSSSLGTQTYICNVNHKPSNTKVDKKVEPKSCDKTHTCPPCPAPELLGGPSVFLFRPALEDLLLGSEANVTCVVVDVSHEDPEVKFNWYVDGVEVHNAKTKPREEQYNSTYRVVSVLTVLHEDWLNGKEYKCKVSNKALPAPIEKTISKAGQPREPQVYLLPPSRDELTKNQVSLTCLAKGFYPKDVLVRWLQGSQELPRENYKTTASVLDSDGSFFVYSKLTVAAEDWKKGDTFSCYVGHEALPLAFTQKSISRSP

SEQ ID NO: 245 - protein, 448 aa, Artificial Sequence
  Description of Artificial Sequence: Synthetic polypeptide
EVQLVESGGGLVQPGGSLRLSCAASGFNIKDTYIHWVRQAPGKGLEWVARIYPTNGYTRYADSVKGRFTISADTSKNTAYLQMNSLRAEDTAVYYCSRWGGDGFYAMDYWGQGTLVTVSSASTKGPSVFPLAPSSKSTSGGTAALGCLVKDYFPEPVTVSWNSGALTSGVHTFPAVLQSSGLYSLSSVVTVPSSSLGTQTYICNVNHKPSNTKVDKKVEPKSCDKTHTCPPCPAPELLGGPSVFLFRPALEDLLLGSEANVTCVVVDVSHEDPEVKFNWYVDGVEVHNAKTKPREEQYNSTYRVVSVLTVLHQDWYNGKEYKCKVSNKALPAPIEKTISKAGQPREPQVYLLPPSRDELTKNQVSLTCLAKGFYPKDVLVRWLQGDQELPRENYKTTASVLDSDGSFFVYSKLTVAAEDWKKGDTFSCMVGHEALPLAFTQKSISRSP

SEQ ID NO: 246 - protein, 448 aa, Artificial Sequence
  Description of Artificial Sequence: Synthetic polypeptide
EVQLVESGGGLVQPGGSLRLSCAASGFNIKDTYIHWVRQAPGKGLEWVARIYPTNGYTRYADSVKGRFTISADTSKNTAYLQMNSLRAEDTAVYYCSRWGGDGFYAMDYWGQGTLVTVSSASTKGPSVFPLAPSSKSTSGGTAALGCLVKDYFPEPVTVSWNSGALTSGVHTFPAVLQSSGLYSLSSVVTVPSSSLGTQTYICNVNHKPSNTKVDKKVEPKSCDKTHTCPPCPAPELLGGPSVFLFRPALEDLLLGSEANVTCVVVDVSHEDPEVKFNWYVDGVEVHNAKTKPREEQYNSTYRVVSVLTVLHQDWYNGKEYKCKVSNKALPAPIEKTISKAGQPREPQVYLLPPSRDELTKNQVSLTCLAKGFYPKDVLVRWLQGSQELPRENYKTTASVLDSDGSFFVYSKLTVAAEDWKKGDTFSCYVGHEALPLAFTQKSISRSP

SEQ ID NO: 247 - protein, 448 aa, Artificial Sequence
  Description of Artificial Sequence: Synthetic polypeptide
EVQLVESGGGLVQPGGSLRLSCAASGFNIKDTYIHWVRQAPGKGLEWVARIYPTNGYTRYADSVKGRFTISADTSKNTAYLQMNSLRAEDTAVYYCSRWGGDGFYAMDYWGQGTLVTVSSASTKGPSVFPLAPSSKSTSGGTAALGCLVKDYFPEPVTVSWNSGALTSGVHTFPAVLQSSGLYSLSSVVTVPSSSLGTQTYICNVNHKPSNTKVDKKVEPKSCDKTHTCPPCPAPELLGGPSVFLFRPALEDLLLGSEANVTCVVVDVSHEDPEVKFNWYVDGVEVHNAKTKPREEQYNSTYRVVSVLTVLHQDWLNGKEYKCKVSNKALPAPIEKTISKAGQPREPQVYLLPPSRDELTKNQVSLTCLAKGFYPKDVLVRWLQGDQELPRENYKTTASVLDSDGSFFVYSKLTVAAEDWKKGDTFSCYVGHEALPLAFTQKSISRSP

SEQ ID NO: 248 - protein, 448 aa, Artificial Sequence
  Description of Artificial Sequence: Synthetic polypeptide
EVQLVESGGGLVQPGGSLRLSCAASGFNIKDTYIHWVRQAPGKGLEWVARIYPTNGYTRYADSVKGRFTISADTSKNTAYLQMNSLRAEDTAVYYCSRWGGDGFYAMDYWGQGTLVTVSSASTKGPSVFPLAPSSKSTSGGTAALGCLVKDYFPEPVTVSWNSGALTSGVHTFPAVLQSSGLYSLSSVVTVPSSSLGTQTYICNVNHKPSNTKVDKKVEPKSCDKTHTCPPCPAPELLGGPSVFLFRPALEDLLLGSEANVTCVVVDVSHEDPEVKFNWYVDGVEVHNAKTKPREEQYNSTYRVVSVLTVLHEDWYNGKEYKCKVSNKALPAPIEKTISKAGQPREPQVYLLPPSRDELTKNQVSLTCLAKGFYPKDVLVRWLQGSQELPRENYKTTASVLDSDGSFFVYSKLTVAAEDWKKGDTFSCYVGHEALPLAFTQKSISRSP

SEQ ID NO: 249 - protein, 448 aa, Artificial Sequence
  Description of Artificial Sequence: Synthetic polypeptide
EVQLVESGGGLVQPGGSLRLSCAASGFNIKDTYIHWVRQAPGKGLEWVARIYPTNGYTRYADSVKGRFTISADTSKNTAYLQMNSLRAEDTAVYYCSRWGGDGFYAMDYWGQGTLVTVSSASTKGPSVFPLAPSSKSTSGGTAALGCLVKDYFPEPVTVSWNSGALTSGVHTFPAVLQSSGLYSLSSVVTVPSSSLGTQTYICNVNHKPSNTKVDKKVEPKSCDKTHTCPPCPAPELLGGPSVFLFRPALEDLLLGSEANVTCVVVDVSHEDPEVKFNWYVDGVEVHNAKTKPREEQYNSTYRVVSVLTVLHQDWYNGKEYKCKVSNKALPAPIEKTISKAGQPREPQVYLLPPSRDELTKNQVSLTCLAKGFYPKDVLVRWLQGDQELPRENYKTTASVLDSDGSFFVYSKLTVAAEDWKKGDTFSCYVGHEALPLAFTQKSISRSP

SEQ ID NO: 250 - protein, 448 aa, Artificial Sequence
  Description of Artificial Sequence: Synthetic polypeptide
EVQLVESGGGLVQPGGSLRLSCAASGFNIKDTYIHWVRQAPGKGLEWVARIYPTNGYTRYADSVKGRFTISADTSKNTAYLQMNSLRAEDTAVYYCSRWGGDGFYAMDYWGQGTLVTVSSASTKGPSVFPLAPSSKSTSGGTAALGCLVKDYFPEPVTVSWNSGALTSGVHTFPAVLQSSGLYSLSSVVTVPSSSLGTQTYICNVNHKPSNTKVDKKVEPKSCDKTHTCPPCPAPELLGGPSVFLFRPALEDLLLGSEANVTCVVVDVSHEDPEVKFNWYVDGVEVHNAKTKPREEQYNSTYRVVSVLTVLHEDWLNGKEYKCKVSNKALPAPIEKTISKAGQPREPQVYLLPPSRDELTKNQVSLTCLAKGFYPKDVLVRWLQGDQELPRENYKTTASVLDSDGSFFVYSKLTVAAEDWKKGDTFSCYVGHEALPLAFTQKSISRSP

SEQ ID NO: 251 - protein, 448 aa, Artificial Sequence
  Description of Artificial Sequence: Synthetic polypeptide
EVQLVESGGGLVQPGGSLRLSCAASGFNIKDTYIHWVRQAPGKGLEWVARIYPTNGYTRYADSVKGRFTISADTSKNTAYLQMNSLRAEDTAVYYCSRWGGDGFYAMDYWGQGTLVTVSSASTKGPSVFPLAPSSKSTSGGTAALGCLVKDYFPEPVTVSWNSGALTSGVHTFPAVLQSSGLYSLSSVVTVPSSSLGTQTYICNVNHKPSNTKVDKKVEPKSCDKTHTCPPCPAPELLGGPSVFLFRPALEDLLLGSEANVTCVVVDVSHEDPEVKFNWYVDGVEVHNAKTKPREEQYNSTYRVVSVLTVLHEDWYNGKEYKCKVSNKALPAPIEKTISKAGQPREPQVYLLPPSRDELTKNQVSLTCLAKGFYPKDVLVRWLQGDQELPRENYKTTASVLDSDGSFFVYSKLTVAAEDWKKGDTFSCYVGHEALPLAFTQKSISRSP

SEQ ID NO: 252 - protein, 448 aa, Artificial Sequence
  Description of Artificial Sequence: Synthetic polypeptide
EVQLVESGGGLVQPGGSLRLSCAASGFNIKDTYIHWVRQAPGKGLEWVARIYPTNGYTRYADSVKGRFTISADTSKNTAYLQMNSLRAEDTAVYYCSRWGGDGFYAMDYWGQGTLVTVSSASTKGPSVFPLAPSSKSTSGGTAALGCLVKDYFPEPVTVSWNSGALTSGVHTFPAVLQSSGLYSLSSVVTVPSSSLGTQTYICNVNHKPSNTKVDKKVEPKSCDKTHTCPPCPAPELLGGPSVFLFRPALEDLLLGSEANVTCVVVDVSHEDPEVKFNWYVDGVEVHNAKTKPREEQYNSTYRVVSVLTVLHEDWYNGKEYKCKVSNKALPAPIEKTISKAGQPREPQVCLLPPSRDELTKNQVSLSCAAKGFYPKDVLVRWLQGDQELPRENYKTTASVLDSDGSFFVVSKLTVAAEDWKKGDTFSCMVGHEALPLAFTQKSISRSP

SEQ ID NO: 253 - protein, 227 aa, Artificial Sequence
  Description of Artificial Sequence: Synthetic polypeptide
QEGDFPMPFISAKSSPVIPLDGSVKIQCQAIREAYLTQLMIIKNSTYREIGRRLKFWNETDPEFVIDHMDANKAGRYQCQYRIGHYRFRYSDTLELVVTGLYGKPFLSADRGLVLMPGENISLTCSSAHIPFDRFSLAKEGELSLPQHQSGEHPANFSLGPVDLNVSGIYRCYGWYNRSPYLWSFPSNALELVVTDSIHQDYTTQNHHHHHHGLNDIFEAQKIEWHE

SEQ ID NO: 254 - protein, 212 aa, Artificial Sequence
  Description of Artificial Sequence: Synthetic polypeptide
CCHPRLSLHRPALEDLLLGSEANLTCTLTGLRDASGVTFTWTPSSGKSAVQGPPERDLCGCYSVSSVLPGCAEPWNHGKTFTCTAAYPESKTPLTATLSKSGNTFRPEVHLLPPPSEELALNELVTLTCLARGFSPKDVLVRWLQGSQELPREKYLTWASRQEPSQGTTTFAVTSILRVAAEDWKKGDTFSCMVGHEALPLAFTQKTIDRLA

SEQ ID NO: 255 - protein, 6 aa, Artificial Sequence
  Description of Artificial Sequence: Synthetic 6xHis tag
HHHHHH

SEQ ID NO: 256 - protein, 448 aa, Artificial Sequence
  Description of Artificial Sequence: Synthetic polypeptide
EVQLVESGGGLVQPGGSLRLSCAASGFNIKDTYIHWVRQAPGKGLEWVARIYPTNGYTRYADSVKGRFTISADTSKNTAYLQMNSLRAEDTAVYYCSRWGGDGFYAMDYWGQGTLVTVSSASTKGPSVFPLAPSSKSTSGGTAALGCLVKDYFPEPVTVSWNSGALTSGVHTFPAVLQSSGLYSLSSVVTVPSSSLGTQTYICNVNHKPSNTKVDKKVEPKSCDKTHTCPPCPAPELLGGPSVFLFRPALEDLLLGSEAAVTCVVVDVSHEDPEVKFNWYVDGVEVHNAKTKPREEQYNSTYRVVSVLTVLHEDWYNGKEYKCKVSNKALPAPIEKTISKAGQPREPQVYLLPPSRDELTKNQVSLTCLAKGFYPKDVLVRWLQGDQELPRENYKTTASVLDSDGSFFVYSKLTVAAEDWKKGDTFSCMVGHEALPLAFTQKSISRSP

SEQ ID NO: 257 - protein, 448 aa, Artificial Sequence
  Description of Artificial Sequence: Synthetic polypeptide
EVQLVESGGGLVQPGGSLRLSCAASGFNIKDTYIHWVRQAPGKGLEWVARIYPTNGYTRYADSVKGRFTISADTSKNTAYLQMNSLRAEDTAVYYCSRWGGDGFYAMDYWGQGTLVTVSSASTKGPSVFPLAPSSKSTSGGTAALGCLVKDYFPEPVTVSWNSGALTSGVHTFPAVLQSSGLYSLSSVVTVPSSSLGTQTYICNVNHKPSNTKVDKKVEPKSCDKTHTCPPCPAPELLGGPSVFLFRPALEDLLLGSEANVTCVVVDVSHEDPEVKFNWYVDGVEVHNAKTKPREEQYASTYRVVSVLTVLHEDWYNGKEYKCKVSNKALPAPIEKTISKAGQPREPQVYLLPPSRDELTKNQVSLTCLAKGFYPKDVLVRWLQGDQELPRENYKTTASVLDSDGSFFVYSKLTVAAEDWKKGDTFSCMVGHEALPLAFTQKSISRSP

SEQ ID NO: 258 - protein, 448 aa, Artificial Sequence
  Description of Artificial Sequence: Synthetic polypeptide
EVQLVESGGGLVQPGGSLRLSCAASGFNIKDTYIHWVRQAPGKGLEWVARIYPTNGYTRYADSVKGRFTISADTSKNTAYLQMNSLRAEDTAVYYCSRWGGDGFYAMDYWGQGTLVTVSSASTKGPSVFPLAPSSKSTSGGTAALGCLVKDYFPEPVTVSWNSGALTSGVHTFPAVLQSSGLYSLSSVVTVPSSSLGTQTYICNVNHKPSNTKVDKKVEPKSCDKTHTCPPCPAPELLGGPSVFLFRPALEDLLLGSEAAVTCVVVDVSHEDPEVKFNWYVDGVEVHNAKTKPREEQYASTYRVVSVLTVLHEDWYNGKEYKCKVSNKALPAPIEKTISKAGQPREPQVYLLPPSRDELTKNQVSLTCLAKGFYPKDVLVRWLQGDQELPRENYKTTASVLDSDGSFFVYSKLTVAAEDWKKGDTFSCMVGHEALPLAFTQKSISRSP

1. An engineered, human IgG1 immunoglobulin or fragment thereof comprising an Fc region comprising a first and second Fc domain, wherein an Fc domain comprises a CH2 and CH3 domain, and wherein the first Fc domain comprises at least one amino acid modification, and wherein the first Fc domain has an amino acid sequence at least 65% identical to an Fc domain of wild-type IgG1 (amino acids CH2-1.6 to CH3-125 (IMGT numbering for C-domain) of SEQ ID NO: 1), and wherein the engineered IgG1 immunoglobulin or fragment thereof binds to and activates human FcαRI.

2. The engineered immunoglobulin or fragment thereof of claim 1, wherein the at least one amino acid modification in the first Fc domain is a substitution that corresponds to an amino acid in an Fc domain of IgA1 (SEQ ID NO: 254), an Fc domain of wild-type IgA2 (amino acids CH2-1.2 to CH3-125 of SEQ ID NO: 2 (IMGT numbering for C-domain)), an Fc domain of parental IgA2 (amino acids CH2-1.2 to CH3-125 of SEQ ID NO: 3 (IMGT numbering for C-domain)) or an affinity matured variant Fc domain of IgA1 or IgA2.

3. The engineered immunoglobulin or fragment thereof of claim 1, wherein, as a result of the at least one amino acid modification in the first Fc domain, the engineered immunoglobulin or fragment thereof is capable of binding to human FcRn.

4. The engineered immunoglobulin or fragment thereof of claim 3, that is capable of binding to human FcRn with an affinity comparable to wild-type IgG1.

5. The engineered immunoglobulin or fragment thereof of claim 1, wherein the first Fc domain further comprises at least one additional amino acid modification, such that the engineered immunoglobulin or fragment thereof is capable of binding to human FcγRs.

6. The engineered immunoglobulin or fragment thereof of claim 1, wherein the engineered immunoglobulin or fragment thereof is a homodimer and wherein the second Fc domain has an amino acid sequence at least 65% identical to an Fc domain from wild-type IgG1 (SEQ ID NO: 1).

7. The engineered immunoglobulin or fragment thereof of claim 1, wherein the engineered immunoglobulin or fragment thereof is a heterodimer and wherein the second Fc domain has an amino acid sequence at least 70% identical to an Fc domain from wild-type IgG1 (SEQ ID NO: 1), and wherein the engineered immunoglobulin or fragment thereof binds to and activates human FcγRs.

8. The engineered immunoglobulin or fragment thereof of claim 7, wherein the second Fc domain binds to FcRn.

9. The engineered immunoglobulin or fragment thereof of claim 7, wherein the FcγRs are human FcγRIa and human FcγRIIIa.

10. The engineered immunoglobulin or fragment thereof of claim 1, wherein the first Fc domain has an amino acid sequence comprised within SEQ ID NO: 122, SEQ ID NO: 148 or SEQ ID NO: 214, and wherein the second Fc domain has an amino acid sequence comprised within SEQ ID NO: 122, SEQ ID NO: 148 or SEQ ID NO: 214, respectively.

11. The engineered immunoglobulin or fragment thereof of claim 3, wherein the first Fc domain has an amino acid sequence comprised within SEQ ID NO: 188 to 193, 234 to 242, 205 to 209 or 223 or has an amino acid sequence comprised within SEQ ID NO: 194 to 199, 244 to 251, 210 to 214 or 224.

12. The engineered immunoglobulin or fragment thereof of claim 5, wherein the first Fc domain has an amino acid sequence comprised within SEQ ID NO: 150, 151, 152 or 153.

13. The engineered immunoglobulin or fragment thereof of claim 7, wherein the first Fc domain has an amino acid sequence comprised within SEQ ID NO: 133, 135, 137, 139, 141, 143, 145, 155, 156, 157, 158 or 252 and wherein the second Fc domain has an amino acid sequence comprised within SEQ ID NO: 132, 134, 136, 138, 140, 142, 144, 154, 159, 160, 161, 162, 163 or 164.

14. The engineered immunoglobulin or fragment thereof of claim 13, wherein the first Fc domain has an amino acid sequence comprised within SEQ ID NO: 157 and the second Fc domain has an amino acid sequence comprised within SEQ ID NO: 159 or 161.

15. The engineered immunoglobulin or fragment thereof of claim 13, wherein the first Fc domain has an amino acid sequence comprised within SEQ ID NO: 252 and the second Fc domain has an amino acid sequence comprised within SEQ ID NO: 159 or 161.

16. The engineered immunoglobulin or fragment thereof of claim 1, further comprising a variable heavy chain domain and a light chain and wherein the engineered immunoglobulin or fragment thereof recognizes and binds to a target antigen.

17. The engineered immunoglobulin or fragment thereof of 16, wherein the target antigen is selected from the group consisting of: fibronectin EDA, HER2, EGFR, CD20, CD30, EpCAM, GD2 and solid tumor antigens.

18. A pharmaceutical composition comprising an engineered immunoglobulin or fragment thereof of claim 1 in combination with one or more pharmaceutically acceptable excipient, diluent or carrier.

19. The pharmaceutical composition according to claim 18, further comprising one or more additional therapeutic agents.

20.-21. (canceled)

22. A method of treating a cell proliferative disorder, the method comprising administering a therapeutically effective amount of an engineered immunoglobulin or fragment thereof of claim 1, to a subject in need thereof.

23. The method according to claim 22, wherein the proliferative disorder is selected from the group consisting of: fibrosis, breast cancer, neuroblastoma, lymphoma, colon carcinoma, epithelial cancer, colorectal cancer, renal cancer and mucosal tumors.

24. An isolated nucleic acid molecule or set of nucleic acid molecules encoding the engineered immunoglobulin or fragment thereof according to claim 1.

25. The isolated nucleic acid molecule or set of nucleic acid molecules according to claim 24, which is complementary DNA (cDNA) or messenger RNA (mRNA).

26. A cloning or expression vector comprising one or more nucleic acid molecules or set of nucleic acid molecules according to claim 24, wherein the vector is suitable for the recombinant production of the engineered immunoglobulin or fragment thereof.

27. A host cell comprising one or more cloning or expression vectors according to claim 26.

28. A process for the production of the engineered immunoglobulin or fragment thereof according to claim 1, comprising culturing a host cell according to claim 27 under conditions sufficient to express the engineered immunoglobulin or fragment thereof, and thereafter purifying and recovering the engineered immunoglobulin or fragment thereof from the host cell culture.

29. A kit comprising the engineered immunoglobulin or fragment thereof according to claim 1, wherein the kit additionally comprises instructions for use and means for administering the engineered immunoglobulin or fragment thereof or the pharmaceutical composition to a subject in need thereof.
